(19) United States
(12) Patent Application Publication
(10) Pub. No.: US 2010/0041564 A1
(43) Pub. Date: Feb. 18, 2010

(54) METHOD FOR ESTABLISHING THE SOURCE OF INFECTION IN A CASE OF FEVER OF UNCLEAR AETIOLOGY

(76) Inventors: Stefan Russwurm, Jena (DE); Konrad Reinhart, Jina (DE); Michael Bauer, Jina (DE)

Correspondence Address: CATALYST LAW GROUP, APC, 9710 SCRANTON ROAD, SUITE S-170, SAN DIEGO, CA, 92121, US

(21) Appl. No.: 12/305,195

(22) PCT Filed: Jun. 6, 2007
(86) PCT No.: PCT/EP2007/005043

§ 371 Date: Oct. 20, 2009

(30) Foreign Application Priority Data
Jun. 16, 2006 (DE) 10 2006 027 842.9

(51) Int. Cl. C12Q 1/68; C40B 30/04; G06F 19/00

(52) U.S. Cl. 506/9; 435/6; 702/19

(57) ABSTRACT

Use of gene expression profiles obtained in vitro from a patient's sample for establishing the local infection of a “fever of unknown origin”, wherein the gene expression profiles are specific for local inflammations of a “fever of unknown origin”, such as peritonitis, pneumonia, endocarditis or infections of the urea tract.

[0001] The present invention relates to the use of gene expression profiles obtained in vitro from a patient's sample for establishing the local inflammation of a fever of unknown origin according to claim 1, a method for measuring in vitro such gene expression profiles according to claim 14, as well as the use of the gene expression profiles and/or of the probes used therefore for establishing the gene activity or the protein products derived therefrom for the screening of active agents against fever of unknown origin and/or peritonitis and/or pneumonia and/or the evaluation of the therapeutic effects of active agents against fever of unknown origin and/or peritonitis and/or pneumonia according to claim 30, as well as a kit according to claim 33.

[0002] Fever of unknown origin (FUO) clinically is defined as a fever with a temperature of more than 38.8° C. lasting over a period of more than 3 weeks, wherein no clear diagnosis regarding the origin could be made after one week of examination. Depending on the origin, there are four classes of FUO described: FUO of classical, nosocomial, immune deficient, or HIV-related origin (1). FUO also was described as rather a known disease with an unusual clinical picture than a rare deficiency (2).

[0003] There is neither a gold standard method nor a diagnosis test, there are no published regulations and no evidence based recommendations for the diagnosis of FUO (3). Up to now, the diagnosis of FUO is a challenge and it is made with the aid of the patient's history, of biopsies (e.g. liver, temporal artery), surgical and/or imaging methods such as abdominal computer tomography or nuclear spin imaging methods (3). All these methods are very expensive and unpleasant for the patient (1) because of the surgical intervention (biopsy, surgery). The following 4 subgroups can be defined with regard to the diagnosed main cause: Infection, malignant tumor, autoimmune disorders and other causes, wherein infection is the most frequent cause of FUO (1, 4).

[0004] An infection was recorded in only 10% of the patients suffering from post operative fever (5). In most cases, the temperature of the patient returned to normal within four days after the surgical intervention. In spite of this fact, some patients developed an infection on the fifth day after the surgery and 12% of them fell ill to pneumonia (5). Similarly. Pile and his colleagues mentioned that fever occurring two days after the surgery was highly likely triggered by an infection such as, for example, an infection of the urinary tract and/or the inner abdomen (peritonitis), pneumonia, an infection triggered by an intravenous catheter.

[0005] Different forms, such as peritonitis, pneumonia, infections of the urea tract or endocarditis (2), can be the local inflammation conditions underlying the FUO. In the following, peritonitis and pneumonia are described, by way of example only, as the inflammation condition underlying FUO.

[0006] In an intensive care unit, pneumonia is one of the most severe infectious diseases which may have dramatic effects on the patient's life expectancy (6,7). Pneumonia is an acute or chronic inflammation of the lung parenchyma, which is mostly caused by an infection by bacteria, viruses or fungi. For clinical diagnostics, a difference is made between pneumonia caught in ambulant or nosocomial treatment. 2-3 million cases of pneumonia caused in ambulant treatment were registered in the USA, whereas experts assume that 750.000 cases of ambulant acquired pneumonia occurred in Germany (8). The costs for pneumonia treatment in the USA alone mount up to approx. US$ 8 bn.

[0007] Pneumonia is defined as being nosocomial if the pneumonia is diagnosed 48 hours after admission of the patient into the hospital (9). The greatest risk of development of a nosocomially acquired pneumonia in patients in intensive care is caused by the use of ventilators. For this reason, the term ventilator associated pneumonia (VAP) became known for this kind of pneumonia (10). The mortality rate in VAP patients is 30% (10).

[0008] According to Saner et al., only 30% of the infections triggered by individual pathogens could be proven in the course of a study of infections caused by surgical operations. According to Sauer, the most common cause of infection in pneumonia was Candida (yeast). In patients suffering from pneumonia, mixed infections with at least two kinds of pathogens (47%), one single pathogen (24%) or no microbes at all (29%) were identified. A possible infection and the resistance is determined on the basis of conventional microbiologic methods of cultivation as well as on resistance tests towards antibiotics (11) and, therefore, underlies the limitations of such methods (non-culturable bacteria, an extended retardation phase due to the administration of antibiotics, etc.).

[0009] Peritonitis is a local infection of the peritoneum caused by the entry of bacteria or fungi into the abdominal cavity. Peritoneal mesothelial cells (PMC) in the muscular part of the membrane are interrupted by intermesothelial gaps (stomata) and thus render the contact with the cavities (lacunae) in the lymphatic vessel and the exit of bacteria from the abdominal cavity (12) possible. According to Hall et al. the quick removal of bacteria from the abdominal cavity is an explanation for the initial septic phase of a peritonitis. An infection of the abdominal cavity is dealt with by means of three different mechanisms: 1. Induction of immune defense such as, for example, the release of inflammation mediators, 2. the migration of polymorphonuclear neutrophiles and the complement cascade, and 3. the formation of an abscess.

[0010] Usually, peritonitis involves mixed microbial populations (12), however, the outcome of a peritonitis varies depending on the pathogen that has caused the peritonitis (13). Troidle et al., for example, describe that Gram-negative infections lead to a higher mortality and that these patients are more likely to need a hospital stay than in the case of Gram-positive pathogens. In the case of Gram-positive peritonitis, a re-occurrence of the infection at a later time takes place in 32% of the cases, whereas, in comparison, this rate is 9% in the case of Gram-negative peritonitis (9%). In spite of many publications which show the effects of the pathogens on the patient (for example 12), some authors assess the reaction of the host to an infection more important than the infection itself (14). These assessments established from animal models, however, base on a physiologic evaluation system and do not use genomic or proteomic experiments.

[0011] New biomolecular methods allow the analysis of the immunologic host response to an infection. Different methods and results are known from the state of the art describing the differential gene activity as response to an disease caused by an infection (15-19).

[0012] The basic usability of gene expression profiles which, for example, can be obtained by means of the micro array technology, for the diagnosis of SIRS, generalized inflammatory inflammations, sepsis and severe sepsis, is described in the PCT application of the Applicant of the present invention (20) or (21), which is herein incorporated by reference.

[0013] The German patent application (22) shows for the first time gene activity marker for the differentiation between infectious and non-infectious multiple organ failure. This application describes the use of 1.297 different genes for in vitro diagnosis of patients suffering from infectious and non-infectious multiple organ failure, respectively.

[0014] It was also possible to show different organ specific studies regarding differential gene expression caused by local inflammations, such as by the examination of lung tissue (19, 23-25) or by examination of changed gene activity of liver tissue in response to faecal peritonitis (26). The tests, however, always related to tissue-specific changes in gene activity, and are, thus, not suitable for establishing a FUO by means of measurement of the gene activity in body fluids.

[0015] In the patent application (27) the gene expression is used for establishing the infectious and non-infectious condition of the identified source of infection and it is not used for determining the source of infection. In order to determine, for example, whether there exists an infection in the knee joint, a biopsy is carried out and the cells contained in the synovial fluid are analyzed. This invention does not teach the examination of the differential gene activity in body fluids for establishing the underlying local inflammation of a FUO.

[0016] Both Reinhart et al. (28) and the not yet prepublished German patent application (29) of the Applicant of the present invention (28), presented gene expression profiles obtained from whole blood of patients in which SIRS and Sepsis, respectively, were diagnosed. The differential gene activity was used in order to evaluate whether gene activity classificators can differentiate between infectious and non-infectious inflammatory diseases. In this study, the experimentally ascertained gene activity classificators were subsequently compared to the clinical parameters available from the patients. It was shown that the identified gene activity classificators are able to well differentiate between infectious and non-infectious conditions if the clinical data pointed to a peritonitis as underlying local inflammation. The ability to differentiate between infectious and non-infectious conditions, however, was reduced when the clinical data indicated a ventilator-associated pneumonia (VAP). The gene activity classificators described by Reinart (2005) and in reference 29, respectively, thus allow the differentiation between infectious and non-infectious conditions. A possibility to establish the underlying local condition of a FUO by means of gene expression profiles was neither disclosed nor rendered obvious.

[0017] Thus, there is urgent need for possibilities for in vitro diagnosis of the underlying local inflammation in a fever of unknown origin. The availability of such in vitro methods will render the diagnosis of FUO quick and not as painful for the patient, allow for appropriate therapeutic measures, and significantly reduce the costs of the treatment.

[0018] The origin of the invention disclosed in the present patent application is the realization that gene activity profiles can be used to determine the underlying local inflammation of a FUO. The use of these gene activities is not possible with the clinical parameters conventionally used for diagnosis, however, it is very important for the initiation of a specialized therapy in intensive care.

[0019] Thus, it is the object of the present invention to use gene activity markers in order to make it possible to establish the local inflammation of a fever of unknown origin.

[0020] This object is solved by the features of claims 1, 14 and 33.

[0021] The present invention relates in particular to the use of gene expression profiles that have been obtained in vitro from a patient's sample for the establishment of the local inflammation of a fever of unknown origin.

[0022] A preferred embodiment of the present invention relates to the use of specific gene expression profiles which permit die localization of the underlying local inflammations. Examples for said local inflammations of a FUO are peritonitis, pneumonia, endocarditis or infections of the urinary tract.

[0023] The invention in particular relates to the gene expression profiles of at least 2 polynucleotides, selected from SEQ-IDs No 1 to 191, which are specific for peritonitis or pneumonia as local inflammations of a “fever of unknown origin”. Here, the gene activities of the polynucleotides with SEQ-IDs No 1 to 191 having similar expression activities can be pooled into diagnostic gene activity clusters.

[0024] These gene activity cluster are composed as follows:

[0025] Cluster 1: SEQ-ID No. 1 to SEQ-ID No. 77 peritonitis specific sequences with significant gene activity (table 3)

[0026] Cluster 2: SEQ-ID NO. 78 to SEQ-ID No. 191 pneumonia specific sequences with significant gene activity (table 3)

[0027] The invention furthermore comprises gene expression profiles of at least 2 polynucleotides, selected from SEQ-ID No. 192 to SEQ-ID No. 432, which are specific for a local inflammation, but not for peritonitis or pneumonia, of a “fever of unknown origin”.

[0028] Another embodiment of the invention also comprises gene expression profiles of at least 2 polynucleotides comprising 80% homology to SEQ-IDs No. 1 to SEQ-ID No. 432, for establishing the local inflammation of a fever of unknown origin.

[0029] The invention also includes the use of these gene expression profiles as inclusion or exclusion criterion to decide whether patients suffering from “fever of unknown origin” are included in clinical studies.

[0030] Another embodiment of the invention is the use of the gene expression profiles obtained in vitro for the creation of gene activity data for electronic further processing. These gene activity data can be used for the production of software for the description of the individual prognosis of a patient, for diagnosis purposes and/or patient data management systems.

[0031] Another use of the gene expression profiles obtained in vitro is the preparation of clinical expert systems and/or the modeling of cellular signal transduction pathways. Like modeling methods and/or programs are, for example. Ingenuity (Fa. Ingenuity Systems), Panther (Applied Biosystems) or other methods known to the person skilled in the art.

[0032] A preferred embodiment is characterized in that a specific gene and/or gene fragment is used for the generation of gene expression profiles, the gene and/or gene fragment being selected from a group consisting of SEQ-ID No. 1 to SEQ-ID No. 432 as well as gene fragments thereof with at least 20-2000 nucleotides.

[0033] A further embodiment of the invention is characterized in that the gene fragments comprise 20-200, preferably 20-80, nucleotides.

[0034] A further embodiment of the invention is characterized in that the gene expression profiles are determined by means of hybridization methods, in particular hybridization methods basing on micro arrays or real-time PGR. Hybridizing methods are well known to the person skilled in the art.

[0035] One further embodiment of the invention is a method, characterized in that for in vitro measurement of gene expression profiles and/or at least one gene activity cluster for establishing a local inflammation of a fever of unknown origin, characterized in that—in patients—the gene activity of a plurality of predetermined genes related to the source of infection are determined in a patient's sample.

[0036] Another embodiment of the invention is characterized in that for in vitro measurement of gene expression profiles and/or at least one gene activity cluster for establishing peritonitis or pneumonia as source of infection of a fever of unknown origin, in patients, the gene activity of a plurality of predetermined genes related to peritonitis and pneumonia as source of infection are determined in a patient's sample, wherein the genes and/or gene fragments specific for peritonitis and pneumonia of the local inflammation are selected from the group consisting of: SEQ-ID No. 1 to SEQ-ID No. 191 as well as gene fragments therefrom with at least 20-2000 nucleotides.

[0037] Another embodiment of the invention is characterized in that the specific sequences SEQ-ID No. 1 to SEQ-ID No. 191 are composed of the following diagnostic clusters:
[0038] Cluster 1: SEQ-ID No.1 to SEQ-ID No. 77 peritonitis specific sequences with significant gene activity
[0039] Cluster 2: SEQ-ID No. 78 to SEQ-ID No. 191 pneumonia specific sequences with significant gene activity

[0040] A further embodiment of the invention is characterized in that the gene fragments comprise 20-200, preferably 20-80 nucleotides.

[0041] Another embodiment of the present invention is characterized in that at least 4 to 100 different genes and gene fragments are used.

[0042] Another embodiment of the present invention is characterized in that at least 200 different genes and/or gene fragments are used.

[0043] Another embodiment of the present invention is characterized in that at least 200 to 500 different genes and/or gene fragments are used.

[0044] Another embodiment of the present invention is characterized in that at least 500 to 1000 different genes and gene fragments are used.

[0045] Another embodiment of the present invention is characterized in that at least 1000 to 2000 different genes and gene fragments are used.

[0046] Another embodiment of the invention is characterized in that the genes or gene fragments listed in table 3 and table 4 and/or the sequences derived from their RNA are replaced by: synthetic analogues, aptamers. Spiegelmers as well as peptido- and morpholinonucleic acids.

[0047] Another embodiment of the invention is characterized in that the synthetic analogues of the genes comprise 20-100, in particular approx. 70 base pairs.

[0048] Another embodiment of the present invention is characterized in that the gene activity is determined by means of hybridization methods.

[0049] Another embodiment of the present invention is characterized in that the gene activity is determined by means of microarrays.

[0050] Another embodiment of the invention is characterized in that the gene activity is determined by hybridization-independent methods, in particular by enzymatic and/or chemical hydrolysis and/or amplification methods, preferably PGR, subsequent quantification of nucleic acids and/or of derivates and/or fragments thereof.

[0051] Another embodiment of the present invention is characterized in that the sample is selected from: tissue, body fluids, in particular blood, serum, plasma, urine, saliva or a mixture thereof.

[0052] Another embodiment of the present invention is characterized in that samples, in particular cell samples, are subjected to a lytic treatment, in order to release their cell contents.

[0053] In another embodiment of the invention, gene expression profiles that are obtained in vitro from a patient's sample and/or of probes used therefore, selected from the group consisting of SEQ-ID No. 1 to SEQ-ID No. 191 as well as gene fragments thereof with at least 20-2000 nucleotides are used for determining the gene activity or the protein products derived therefrom for the screening of active agents against fever of unknown origin and/or peritonitis and/or pneumonia and/or for the evaluation of the therapeutic effects of active agents against fever of unknown origin and/or peritonitis and/or pneumonia.

[0054] Another embodiment of the invention is characterized in that hybridizable synthetic analogues of the probes listed in tables 3 and 4 are used.

[0055] A further embodiment of the invention is characterized in that the gene fragments comprise 20-200, preferably 20-80 nucleotides.

[0056] The invention also relates to a kit containing a selection of sequences which are specific for the establishment of the local inflammation of a “fever of unknown origin”, and/or gene fragments thereof with at least 20-2000 nucleotides for the determination of gene expression profiles in vitro in a patient's sample, for determining of a source of infection and/or the source of infection of a fever of unknown origin.

[0057] Another embodiment of the invention is characterized in that the kit contains a selection of at least 2 polynucleotides with sequences according to SEQ-ID No. 1 to SEQ-ID No. 191 and/or gene fragments thereof with at least 20-2000 nucleotides for determining gene expression profiles in vitro in a patient's sample, for establishing peritonitis and/or pneumonia as local inflammation of a fever of unknown origin.

### WORKING EXAMPLE

[0058] Test for the creation of gene expression profiles to establish the local inflammation of patients diagnosed with fever of unknown origin (1.3) and severe infection (30).

### Measurement of the Differential Gene Expression

[0059] First of all, the differential gene expression between two groups of patients was tested, wherein the following was known from the groups:

[0060] i) the first (partially blinded) group were patients suffering from a severe infection [sepsis, classified according to 30] in the course of their intensive care treatment and diagnosed with “fever of unknown origin” (patient group 1). The local inflammation underlying the FUO was not known in these patients.

[0061] ii) the second group were patients who developed an acute generalized inflammation [SIRS, classified according to 30] with organ failure in the course of their treatment in intensive care, but in whom no infection was detected at any time during their treatment in intensive care (patient group 2).

[0062] Selected characteristics of both patient groups are shown in table 1. Information includes age, sex, as well as the SOFA-score as a measure for the function of the organ systems. In addition, the plasma protein levels of procalcitonine (PCT) and CRP as well as the number of leukocytes of the patients are given.

[0063] Reference samples were total RNA from SIG-M5 cell lines.

[0064] Each of the patients' samples was co-hybridized with the reference sample on one microarray each.

TABLE 1
Data of patient groups 1 and 2

| | patients with severe infection | SIRS + OD |
|---|---|---|
| | patient group 1 | patient group 2 |
| Number of patients | 39 | 37 |
| Mortality | 16 (41.0%) | 2° (5.4%) |
| Sex [m/f] | 31/8 | 18/19 |
| Age [years] | 69 (11) | 75 (14) |
| SOFA Score | 9 (2.5) | 8* (2) |
| Number of OD | 3 (1) | 2 (1) |
| PCT [ng/ml] | 2.44 (3.20) [36] | 3.34 (4.13) [30] |
| CRP [mg/l] | 177 (124.4) [35] | 91.6* (90.13) [36] |
| WBC [no/l] | 14400 (9050) | 11900* (7400) |

*p < 0.05 (Wilcoxon rang sum test)
°p = 0.003 (exact test of Fisher)

### Median (IQR)

### Experimental Description:

### Drawing Blood and Isolation of RNA

[0065] At the time when “fever of unknown origin” was diagnosed, the whole blood of patient group 1 was drawn postoperatively from the patients by means of the PAXGene Kit according to the manufacturer's (Qiagen) instructions. The whole blood of patient group 2 was postoperatively drawn by means of the PAXGene Kit Kit according to the manufacturer's (Qiagen) instructions. After drawing whole blood, the total RNA of the samples was isolated using the PAXGene Blood RNA kit according to the manufacturer's (Qiagen) instructions.

### Cell Cultivation

[0066] For cell cultivation (control samples) 19 cryo cell cultures (SIGM5) (frozen in liquid nitrogen) were used. The cells were each inoculated with 2 ml Iscove's medium (Biochrom AG) supplemented with 20% fetal calf serum (FCS). Subsequently, the cell cultures were incubated in 12 well plates for 24 hours at 37° C. in 5% CO2. Subsequently, the content of the 18 wells was parted in 2 parts with the same volume each, so that finally 3 plates of the same format (36 wells in total) were available. Afterwards, the cultivation was continued under the same conditions for 24 hours. Afterwards, the resulting cultures of 11 wells of each plate were combined and centrifuged (1000×g, 5 min, ambient temperature). The supernatant was removed and the cell pellet was dissolved in 40 ml of the above mentioned medium. These 40 ml of dissolved cells were distributed in equal shares in two 250 ml flasks and again incubated after adding 5 ml of the above-mentioned medium. 80 μl of the remaining 2 ml of the two remaining plates were placed in empty wells of the same plates that had previously been prepared with 1 ml of the above-mentioned medium. After 48 hours of incubation, only one of the 12 well plates was processed as follows: 500 μl were extracted from each well and combined. The resulting 6 ml were introduced into a 250 ml flask comprising approximately 10 ml of fresh medium. This mixture was centrifuged for 5 minutes with 1000×g at ambient temperature and dissolved in 10 ml of the above-mentioned medium. The following results were obtained by subsequent counting of cells: 1.5×107 cells per ml, 10 ml total volume, total number of cells: 1.5×108. As the number of cells was not yet sufficient, 2.5 ml of the above-mentioned cell suspension was introduced into 30 ml of the above-mentioned medium in a 250 ml (75 cm²) flask (4 flasks in total). After 72 hours of incubation 20 ml of fresh medium were added to each flask. After the subsequent incubation of 24 hours, the cells were counted as described above. The total amount of cells was 3.8×10⁸ cells. In order to obtain the desired number of cells of 2×106 cells, the cells were resuspended in 47.5 ml of the above mentioned medium in 4 flasks. After the incubation time of 24 hours, the cells were centrifuged and washed two times with phosphate buffer in absence of Ca²⁺ and Mg²⁺ (Biochrom AG).

[0067] The isolation of the total RNA is performed by means of NucleoSpin RNA L Kits (Machery&Nagel) according to the manufacturer's instructions. The above described process was repeated until the necessary number of cells was obtained. This was necessary to obtain the necessary amount of 6 mg total RNA corresponding to an efficiency of 600 μg RNA per 108 cells.

### Reverse Transcription/Labeling/Hybridization

[0068] After drawing whole blood, the total RNA of the samples was isolated and tested for quality using the PAXGene Blood RNA kit (PreAnalytiX) according to the manufacturer's instructions. 10 μg total RNA were aliquoted from each sample and transcribed with 10 μg total RNA from SIGM5 cells as reference RNA to complementary DNA (cDNA) by means of the reverse transcriptase Superscript II (Invitrogen). Subsequently, the RNA was removed from the mixture by alkaline hydrolysis. In the reaction mixture a part of the dTTP was replaced by aminoallyl-dUTP (AA-dUTP) in order to render the linkage of the fluorescent dye to the cDNA possible at a later point of time.

[0069] After the purification of the reaction mixture, the cDNA of the samples and the controls were covalently labeled with the fluorescent dyes Alexa 647 and Alexa 555 and hybridized on a microarray of the SIRS-Lab company. On the microarray used, 5308 polynucleotides with lengths of 55 to 70 base pairs were immobilized. Each of the polynucleotides represents a human gene. Additionally there were control spots for quality assurance. One microarray is divided into 28 subarrays, each of the subarrays being arranged in a grid of 15×15 spots.

[0070] The hybridization and the subsequent washing and drying, respectively, were carried out according to the manufacturer's instructions for 10.5 hours at 42° C. using the hybridization station HS 400 (Tecan). The hybridization solution used was composed of the cDNA samples, each labelled, 3.5×SSC (1×SSC comprises 150 mM sodium chloride and 15 mM sodium citrate), 0.3% sodium lauryl sulfate (v/v) 25% formamide (v/v) and each 0.8 μg μl-l cot-1-DNA, yeast t-RNA and poly-A RNA. The subsequent washing of the microarrays was carried out at ambient temperature according to the following scheme: Rinse 90 seconds with washing buffer 1 (2×SSC, 0.03% sodium lauryl sulfate), with washing buffer 2 (1×SSC) and finally with washing buffer 3 (0.2×SSC). Subsequently, the microarrays were dried under a nitrogen flow at a pressure of 2.5 bar for more than 150 seconds at 30° C.

[0071] After hybridization, the hybridization signals of the microarrays were read by means of the GenePix 4000B (Axon) scanner and the expression ratios of the different expressed genes were determined by means of the GenePix Pro 4.0 (Axon) software.

### Evaluation:

[0072] For the analysis, the average intensity of one spot was determined as median value of the corresponding spot pixel.

### Correction of Systematic Errors:

[0073] Systematic errors were corrected according to the approach of Huber et al. [31]. According to this approach, the additive and the multiplicative bias in a microarray was estimated on the basis of 70% of the gene samples present. For all further computations, the signals were transformed by means of arcus sinus hyperbolicus.

[0074] For the analysis, the normalized and transformed relative ratios of the signals of the patients samples were calculated with respect to the general control. This means that the calculation for the gene no. j of the patient no. n revealed the data Gj,n=arcsinh (Scy5(j,n))−arcsinh(Scy3(j.n)), wherein [SCy3(j,n). SCy5(j,n)] is the associated signal pair. When a spot could not be analyzed for a patient (e.g. scanned picture is stained), the associated value was marked as “missing value”.

### Statistical Comparison:

[0075] For comparison the paired random student test was employed per gene. Both random tests contained the values of the patient groups. In order to select the differentially expressed genes, the corresponding p-value was evaluated. It applied for the group of the selected genes that the associated p-value was smaller than 0.05.

[0076] In the sequence listing attached to the present application, the sequences indicated in tables 3 and 4 are individually allocated to one sequence ID (Sequence ID: 1 to Sequence ID: 432).

[0077] Thus, the gene activities ascertained and shown in tables 3 and 4 can be used for the distinction of infectious and non-infectious conditions. These results confirm the methods and results from the state of the art, as for example shown in (20-22).

Unblinding of Patient Group 1 and Correlation with the Ascertained Gene Activities of Table 3 and 4.

[0078] The unblinding of patient group 1 revealed that this patient group consisted of two subgroups:

[0079] 1) Patients, in which FUO and a severe infection were diagnosed and the follow-up diagnosis identified peritonitis as underlying local infection (patient group 1a).

[0080] 2) Patients, in which FUO and a severe infection were diagnosed and the follow-up diagnosis identified pneumonia as underlying local infection (patient group 1b).

[0081] Selected characteristics of the two patient groups 1a and 1b subsequent to the follow-up diagnosis are shown in table 2.

TABLE 2
Data of patient groups 1a and 1b

| | Patient group 1a | Patient group 1b |
|---|---|---|
| Number of patients | 15 | 24 |
| Mortality | 9 (60%) | 7 (29.2%) |
| Sex [m/f] | 11/4 | 20/4 |
| Age [years] | 66 (9) | 70 (13) |
| SOFA Score | 9 (2.5) | 9 (2.25) |
| Number of OD | 3 (0) | 2.5 (1) |
| PCT [ng/ml] | 6.05 (24.3) [13] | 1.46* (1.98) [23] |
| CRP [mg/l] | 146 (87.5) | 206 (95.75) [20] |
| WBC [no/l] | 14400 (11000) | 14650 (6875) |
| Local inflammation | peritonitis | pneumonia |

[0082] In order to establish a local inflammation underlying a FUO in patients, the determined gene activities from table 3 and 4 were statistically classified according to significant gene activity clusters which showed a similar activity within patient groups 1a and 1b. In this context, it was surprisingly found out that, basing on all gene activities measured, a classification of gene activities into three cluster resulted:

[0083] Cluster 1: For peritonitis, a cluster of specific sequences with significant gene activity according to SEQ-ID No. 1 to SEQ-ID No. 77 was determined, which are part of the enclosed sequence listing.

[0084] Cluster 2: For pneumonia, a cluster of specific sequences with significant gene activity corresponding to SEQ-ID No. 78 to SEQ-ID No. 191 was determined, which are part of the enclosed sequence listing.

[0085] Cluster 3: Common set of sequences with similar significant gene activity in patients with severe infections which are specific for a local inflammation, but not for peritonitis or pneumonia of a “fever of unknown origin”, corresponding to SEQ-ID No. 192 to SEQ-ID No. 432, which are part of the enclosed sequence listing.

[0086] The three gene activity cluster are shown in table 3 (cluster 1 and 2) and 4 (cluster 3).

TABLE 3
Gene activity cluster 1 and 2 for establishing peritonitis (cluster 1) or
pneumonia (cluster 2) as local inlammation of a FUO

| | | normalized and | | | | | |
|---|---|---|---|---|---|---|---|
| GenBank | | transformed expression signals | | | | | |
| Accession No. | p value | mean patient group 2 | mean patient group 1a | UniGene | Cluster | subgroup | SeqID |
| AA029887 | 0.0003 | −0.145 | 0.174 | | 1 | Peritonitis | 1 |
| AA149226 | 0.0028 | −0.248 | 0.298 | Hs.494192 | 1 | Peritonitis | 2 |
| AA398757 | 0.0000 | −0.665 | 0.798 | Hs.634201 | 1 | Peritonitis | 3 |
| AA402274 | 0.0110 | −0.216 | 0.259 | Hs.567266 | 1 | Peritonitis | 4 |
| AA419092 | 0.0046 | 0.152 | −0.182 | Hs.122575 | 1 | Peritonitis | 5 |
| AA435854 | 0.0000 | 0.197 | −0.236 | | 1 | Peritonitis | 6 |
| AA441793 | 0.0081 | −0.159 | 0.191 | Hs.132753 | 1 | Peritonitis | 7 |
| AA458827 | 0.0002 | −0.42 | 0.503 | Hs.500546 | 1 | Peritonitis | 8 |
| AA479285 | 0.0296 | −0.094 | 0.113 | Hs.536450 | 1 | Peritonitis | 9 |
| AA490815 | 0.0073 | 0.144 | −0.173 | Hs.558393 | 1 | Peritonitis | 10 |
| AA620762 | 0.0272 | −0.14 | 0.168 | Hs.371845 | 1 | Peritonitis | 11 |
| AA629051 | 0.0017 | 0.13 | −0.156 | | 1 | Peritonitis | 12 |
| AA693514 | 0.0224 | 0.09 | −0.107 | Hs.134229 | 1 | Peritonitis | 13 |
| AA708806 | 0.0014 | −0.129 | 0.154 | Hs.596038 | 1 | Peritonitis | 14 |
| AA731679 | 0.0415 | −0.235 | 0.282 | Hs.128619 | 1 | Peritonitis | 15 |
| AI057616 | 0.0207 | −0.102 | 0.123 | Hs.83761 | 1 | Peritonitis | 16 |
| AI086719 | 0.0347 | 0.105 | −0.126 | Hs.127657 | 1 | Peritonitis | 17 |
| AI128170 | 0.0432 | 0.111 | −0.133 | Hs.592034 | 1 | Peritonitis | 18 |
| AI150418 | 0.0353 | 0.111 | −0.133 | Hs.545647 | 1 | Peritonitis | 19 |
| AI218498 | 0.0480 | 0.113 | −0.135 | Hs.585282 | 1 | Peritonitis | 20 |
| AI221860 | 0.0304 | −0.229 | 0.275 | Hs.208353 | 1 | Peritonitis | 21 |
| AI241294 | 0.0484 | 0.125 | −0.15 | Hs.308641 | 1 | Peritonitis | 22 |
| AI282924 | 0.0001 | −0.166 | 0.199 | Hs.591290 | 1 | Peritonitis | 23 |
| AI291041 | 0.0003 | 0.215 | −0.258 | | 1 | Peritonitis | 24 |
| AI374599 | 0.0015 | 0.132 | −0.158 | Hs.128060 | 1 | Peritonitis | 25 |
| AI418437 | 0.0066 | −0.264 | 0.317 | Hs.534383 | 1 | Peritonitis | 26 |
| AI420865 | 0.0035 | −0.148 | 0.178 | Hs.541901 | 1 | Peritonitis | 27 |
| AI499146 | 0.0126 | −0.147 | 0.176 | | 1 | Peritonitis | 28 |
| AI520932 | 0.0211 | −0.111 | 0.133 | Hs.516707 | 1 | Peritonitis | 29 |
| AI627453 | 0.0401 | 0.104 | −0.125 | Hs.370510 | 1 | Peritonitis | 30 |
| AI634473 | 0.0158 | 0.107 | −0.128 | Hs.603284 | 1 | Peritonitis | 31 |
| AI696984 | 0.0069 | −0.121 | 0.145 | Hs.262907 | 1 | Peritonitis | 32 |
| AI732971 | 0.0169 | 0.179 | −0.214 | Hs.559775 | 1 | Peritonitis | 33 |
| AI912592 | 0.0005 | −0.148 | 0.177 | Hs.86538 | 1 | Peritonitis | 34 |
| BC004983 | 0.0486 | −0.103 | 0.124 | Hs.81328 | 1 | Peritonitis | 35 |
| BC032713 | 0.0047 | −0.131 | 0.157 | Hs.87968 | 1 | Peritonitis | 36 |
| CARD10 | 0.0003 | −0.154 | 0.184 | Hs.57973 | 1 | Peritonitis | 37 |
| CCL15.2 | 0.0184 | −0.096 | 0.115 | Hs.272493 | 1 | Peritonitis | 38 |
| CCL26 | 0.0259 | 0.127 | −0.153 | Hs.131342 | 1 | Peritonitis | 39 |
| CCL27 | 0.0082 | 0.129 | −0.154 | Hs.459590 | 1 | Peritonitis | 40 |
| CR1 | 0.0001 | −0.167 | 0.2 | Hs.334019 | 1 | Peritonitis | 41 |
| DNAJB2 | 0.0000 | −0.226 | 0.271 | Hs.77768 | 1 | Peritonitis | 42 |
| FADD | 0.0004 | −0.153 | 0.184 | Hs.86131 | 1 | Peritonitis | 43 |
| GH1.1 | 0.0033 | −0.268 | 0.322 | Hs.406754 | 1 | Peritonitis | 44 |
| H05223 | 0.0000 | −0.175 | 0.21 | Hs.124638 | 1 | Peritonitis | 45 |
| H11661 | 0.0000 | −0.223 | 0.267 | Hs.504091 | 1 | Peritonitis | 46 |
| H91663 | 0.0009 | −0.151 | 0.181 | Hs.208052 | 1 | Peritonitis | 47 |
| IF | 0.0084 | −0.158 | 0.19 | Hs.312485 | 1 | Peritonitis | 48 |
| IL21R | 0.0065 | −0.179 | 0.214 | Hs.210546 | 1 | Peritonitis | 49 |
| IL2RB | 0.0223 | 0.341 | −0.409 | Hs.474787 | 1 | Peritonitis | 50 |
| KBRAS2 | 0.0000 | −0.204 | 0.244 | Hs.632252 | 1 | Peritonitis | 51 |
| MAP2K2 | 0.0000 | −0.195 | 0.235 | Hs.465627 | 1 | Peritonitis | 52 |
| N64541 | 0.0088 | 0.172 | −0.207 | Hs.597199 | 1 | Peritonitis | 53 |
| NM_004710 | 0.0388 | −0.088 | 0.105 | Hs.464210 | 1 | Peritonitis | 54 |
| NM-001774 | 0.0002 | −0.192 | 0.23 | Hs.166556 | 1 | Peritonitis | 55 |
| NM-002649 | 0.0001 | −0.177 | 0.212 | Hs.602240 | 1 | Peritonitis | 56 |
| NM-006058 | 0.0018 | −0.208 | 0.25 | Hs.543850 | 1 | Peritonitis | 57 |
| NM-006732 | 0.0046 | −0.255 | 0.307 | Hs.590958 | 1 | Peritonitis | 58 |
| NM-014339 | 0.0019 | −0.146 | 0.175 | Hs.129751 | 1 | Peritonitis | 59 |
| NM-139276 | 0.0008 | −0.143 | 0.172 | Hs.463059 | 1 | Peritonitis | 60 |
| NOX2 | 0.0008 | −0.154 | 0.184 | Hs.292356 | 1 | Peritonitis | 61 |
| PLAT.2 | 0.0116 | −0.154 | 0.184 | Hs.491582 | 1 | Peritonitis | 62 |
| PPARD | 0.0000 | −0.179 | 0.215 | Hs.485196 | 1 | Peritonitis | 63 |
| R26118 | 0.0059 | 0.184 | −0.22 | Hs.594374 | 1 | Peritonitis | 64 |
| R36650 | 0.0052 | −0.126 | 0.151 | Hs.591522 | 1 | peritonitis | 65 |
| R43074 | 0.0480 | 0.08 | −0.096 | Hs.298851 | 1 | Peritonitis | 66 |
| R53961 | 0.0118 | −0.106 | 0.127 | Hs.124128 | 1 | Peritonitis | 67 |
| R96155 | 0.0026 | 0.131 | −0.157 | | 1 | Peritonitis | 68 |
| TNFRSF6B.1 | 0.0045 | −0.122 | 0.146 | Hs.434878 | 1 | Peritonitis | 69 |
| TRIAD3 | 0.0039 | −0.143 | 0.172 | Hs.487458 | 1 | Peritonitis | 70 |
| TUCAN | 0.0001 | −0.153 | 0.183 | Hs.446146 | 1 | Peritonitis | 71 |
| W32272 | 0.0025 | 0.146 | −0.176 | Hs.594426 | 1 | Peritonitis | 72 |
| W85706 | 0.0000 | −0.214 | 0.257 | Hs.458973 | 1 | Peritonitis | 73 |
| XM-001687 | 0.0027 | −0.155 | 0.186 | Hs.77867 | 1 | Peritonitis | 74 |
| XM-006800 | 0.0000 | −0.235 | 0.282 | Hs.591043 | 1 | Peritonitis | 75 |
| XM-032902 | 0.0063 | 0.191 | −0.23 | Hs.593754 | 1 | Peritonitis | 76 |
| XM-036966 | 0.0190 | −0.097 | 0.116 | Hs.431850 | 1 | Peritonitis | 77 |
| GenBank | | | | | | | |
| Accession | | | | | | | |
| Nummer | p value | mean patient group 2 | mean patient group 1b | UniGene | Cluster | Subgroup | SeqID |
| AA017263 | 0.0099 | 0.16 | −0.127 | Hs.156727 | 2 | Pneumonia | 78 |
| AA017301 | 0.0179 | 0.139 | −0.11 | Hs.85863 | 2 | Pneumonia | 79 |
| AA031731 | 0.0015 | −0.358 | 0.283 | Hs.238964 | 2 | Pneumonia | 80 |
| AA398760 | 0.0275 | 0.213 | −0.168 | Hs.570638 | 2 | Pneumonia | 81 |
| AA400434 | 0.0088 | 0.137 | −0.108 | Hs.563200 | 2 | Pneumonia | 82 |
| AA400470 | 0.0418 | 0.146 | −0.115 | Hs.97805 | 2 | Pneumonia | 83 |
| AA402483 | 0.0138 | 0.169 | −0.134 | Hs.97313 | 2 | Pneumonia | 84 |
| AA417980 | 0.0004 | −0.281 | 0.223 | Hs.479226 | 2 | Pneumonia | 85 |
| AA428463 | 0.0195 | −0.186 | 0.147 | Hs.372739 | 2 | Pneumonia | 86 |
| AA436250 | 0.0019 | −0.361 | 0.286 | Hs.490203 | 2 | Pneumonia | 87 |
| AA452113 | 0.0054 | 0.144 | −0.114 | Hs.500643 | 2 | Pneumonia | 88 |
| AA458912 | 0.0330 | 0.167 | −0.132 | Hs.281898 | 2 | Pneumonia | 89 |
| AA459648 | 0.0086 | 0.154 | −0.122 | | 2 | Pneumonia | 90 |
| AA478611 | 0.0132 | −0.221 | 0.175 | Hs.105616 | 2 | Pneumonia | 91 |
| AA479727 | 0.0239 | 0.128 | −0.101 | Hs.23158 | 2 | Pneumonia | 92 |
| AA514450 | 0.0107 | 0.141 | −0.112 | | 2 | Pneumonia | 93 |
| AA541644 | 0.0000 | −0.218 | 0.173 | Hs.232165 | 2 | Pneumonia | 94 |
| AA548307 | 0.0234 | 0.137 | −0.108 | Hs.399800 | 2 | Pneumonia | 95 |
| AA626313 | 0.0137 | 0.142 | −0.113 | Hs.116150 | 2 | Pneumonia | 96 |
| AA628539 | 0.0280 | −0.132 | 0.105 | Hs.371001 | 2 | Pneumonia | 97 |
| AA699706 | 0.0043 | −0.268 | 0.212 | Hs.464779 | 2 | Pneumonia | 98 |
| AA844053 | 0.0402 | 0.119 | −0.094 | Hs.535257 | 2 | Pneumonia | 99 |
| AA887470 | 0.0423 | −0.12 | 0.095 | Hs.531081 | 2 | Pneumonia | 100 |
| AA897543 | 0.0122 | 0.235 | −0.186 | Hs.148217 | 2 | Pneumonia | 101 |
| AA906116 | 0.0083 | 0.264 | −0.209 | Hs.521545 | 2 | Pneumonia | 102 |
| AA910923 | 0.0030 | 0.194 | −0.153 | Hs.191164 | 2 | Pneumonia | 103 |
| AA935135 | 0.0222 | 0.148 | −0.117 | Hs.585129 | 2 | Pneumonia | 104 |
| AA969039 | 0.0051 | 0.152 | −0.121 | Hs.544636 | 2 | Pneumonia | 105 |
| AA992540 | 0.0002 | 0.258 | −0.204 | Hs.491869 | 2 | Pneumonia | 106 |
| ADRA2A | 0.0391 | −0.116 | 0.092 | Hs.249159 | 2 | Pneumonia | 107 |
| AF077011 | 0.0003 | 0.17 | −0.135 | Hs.459095 | 2 | Pneumonia | 108 |
| AI005466 | 0.0005 | 0.175 | −0.139 | Hs.602706 | 2 | Pneumonia | 109 |
| AI023336 | 0.0002 | 0.217 | −0.172 | Hs.370267 | 2 | Pneumonia | 110 |
| AI140065 | 0.0091 | −0.25 | 0.198 | Hs.146594 | 2 | Pneumonia | 111 |
| AI142427 | 0.0101 | −0.219 | 0.174 | Hs.300684 | 2 | Pneumonia | 112 |
| AI150305 | 0.0231 | 0.202 | −0.16 | Hs.128031 | 2 | Pneumonia | 113 |
| AI160757 | 0.0119 | 0.225 | −0.178 | Hs.408960 | 2 | Pneumonia | 114 |
| AI191762 | 0.0381 | 0.206 | −0.163 | Hs.495918 | 2 | Pneumonia | 115 |
| AI264774 | 0.0041 | 0.17 | −0.135 | Hs.514242 | 2 | Pneumonia | 116 |
| AI272798 | 0.0478 | −0.103 | 0.082 | Hs.479808 | 2 | Pneumonia | 117 |
| AI285411 | 0.0306 | −0.142 | 0.113 | Hs.635265 | 2 | Pneumonia | 118 |
| AI375046 | 0.0005 | 0.238 | −0.189 | | 2 | Pneumonia | 119 |
| AI421397 | 0.0391 | −0.117 | 0.093 | Hs.507025 | 2 | Pneumonia | 120 |
| AI492528 | 0.0268 | −0.158 | 0.125 | | 2 | Pneumonia | 121 |
| AI554942 | 0.0448 | 0.228 | −0.181 | Hs.570675 | 2 | Pneumonia | 122 |
| AI568793 | 0.0058 | −0.322 | 0.255 | Hs.368944 | 2 | Pneumonia | 123 |
| AI625724 | 0.0046 | −0.225 | 0.178 | Hs.185597 | 2 | Pneumonia | 124 |
| AI635650 | 0.0212 | 0.131 | −0.104 | | 2 | Pneumonia | 125 |
| AI654928 | 0.0000 | 0.272 | −0.216 | Hs.196133 | 2 | Pneumonia | 126 |
| AI685048 | 0.0004 | −0.165 | 0.131 | Hs.369785 | 2 | Pneumonia | 127 |
| AI700169 | 0.0010 | −0.334 | 0.264 | Hs.584910 | 2 | Pneumonia | 128 |
| AI745409 | 0.0032 | −0.265 | 0.21 | Hs.204924 | 2 | Pneumonia | 129 |
| AI798514 | 0.0314 | 0.143 | −0.113 | Hs.632218 | 2 | Pneumonia | 130 |
| AI799683 | 0.0047 | −0.149 | 0.118 | Hs.592083 | 2 | Pneumonia | 131 |
| AI799767 | 0.0323 | 0.22 | −0.175 | Hs.209226 | 2 | Pneumonia | 132 |
| AI801504 | 0.0108 | −0.135 | 0.107 | Hs.16064 | 2 | Pneumonia | 133 |
| AI808903 | 0.0240 | −0.15 | 0.118 | Hs.519855 | 2 | Pneumonia | 134 |
| AI811774 | 0.0115 | −0.148 | 0.117 | | 2 | Pneumonia | 135 |
| AI861979 | 0.0148 | 0.143 | −0.114 | Hs.469134 | 2 | Pneumonia | 136 |
| AI866656 | 0.0007 | 0.164 | −0.13 | Hs.211814 | 2 | Pneumonia | 137 |
| BC001604 | 0.0001 | −0.214 | 0.169 | Hs.182014 | 2 | Pneumonia | 138 |
| C2 | 0.0016 | 0.165 | −0.13 | Hs.408903 | 2 | Pneumonia | 139 |
| H02254 | 0.0280 | 0.245 | −0.194 | Hs.632489 | 2 | Pneumonia | 140 |
| H05436 | 0.0000 | 0.241 | −0.191 | Hs.11110 | 2 | Pneumonia | 141 |
| H11068 | 0.0045 | −0.174 | 0.138 | Hs.317243 | 2 | Pneumonia | 142 |
| H22946 | 0.0015 | 0.171 | −0.135 | Hs.534590 | 2 | Pneumonia | 143 |
| H38159 | 0.0026 | 0.211 | −0.167 | Hs.162996 | 2 | Pneumonia | 144 |
| H50201 | 0.0430 | −0.17 | 0.135 | Hs.21413 | 2 | Pneumonia | 145 |
| H73724 | 0.0002 | 0.211 | −0.167 | Hs.119882 | 2 | Pneumonia | 146 |
| H83996 | 0.0020 | 0.147 | −0.116 | Hs.153458 | 2 | Pneumonia | 147 |
| ICAM4 | 0.0113 | 0.118 | −0.093 | Hs.631609 | 2 | Pneumonia | 148 |
| IL18mRNA | 0.0001 | −0.182 | 0.144 | Hs.83077 | 2 | Pneumonia | 149 |
| IL26mRNA | 0.0293 | 0.108 | −0.085 | Hs.272350 | 2 | Pneumonia | 150 |
| LTBP4 | 0.0499 | −0.161 | 0.128 | Hs.466766 | 2 | Pneumonia | 151 |
| LTBR | 0.0191 | −0.164 | 0.13 | Hs.1116 | 2 | Pneumonia | 152 |
| M37435 | 0.0488 | −0.109 | 0.087 | Hs.173894 | 2 | Pneumonia | 153 |
| MAP4K4 | 0.0192 | −0.13 | 0.103 | Hs.431550 | 2 | Pneumonia | 154 |
| MAPK11.1 | 0.0268 | 0.116 | −0.092 | Hs.57732 | 2 | Pneumonia | 155 |
| MAPK7 | 0.0195 | −0.233 | 0.184 | Hs.150136 | 2 | Pneumonia | 156 |
| N29761 | 0.0156 | 0.552 | −0.437 | Hs.9315 | 2 | Pneumonia | 157 |
| N49848 | 0.0384 | 0.213 | −0.168 | Hs.104091 | 2 | Pneumonia | 158 |
| N55249 | 0.0426 | −0.185 | 0.147 | Hs.143347 | 2 | Pneumonia | 159 |
| N64649 | 0.0181 | 0.166 | −0.131 | Hs.102402 | 2 | Pneumonia | 160 |
| N69363 | 0.0284 | 0.158 | −0.125 | Hs.594444 | 2 | Pneumonia | 161 |
| N70546 | 0.0071 | −0.253 | 0.2 | Hs.155040 | 2 | Pneumonia | 162 |
| N80868 | 0.0128 | 0.143 | −0.113 | Hs.211426 | 2 | Pneumonia | 163 |
| NFKBIL2 | 0.0003 | −0.184 | 0.146 | Hs.459376 | 2 | Pneumonia | 164 |
| NM-001295 | 0.0001 | −0.189 | 0.149 | Hs.301921 | 2 | Pneumonia | 165 |
| NM-057158 | 0.0214 | 0.169 | −0.134 | Hs.417962 | 2 | Pneumonia | 166 |
| NOX1.2 | 0.0265 | 0.239 | −0.189 | Hs.592227 | 2 | Pneumonia | 167 |
| R00206 | 0.0028 | 0.199 | −0.158 | Hs.533551 | 2 | Pneumonia | 168 |
| R09463 | 0.0145 | 0.176 | −0.139 | Hs.344165 | 2 | Pneumonia | 169 |
| R16722 | 0.0334 | 0.221 | −0.175 | Hs.124246 | 2 | Pneumonia | 170 |
| R41771 | 0.0013 | 0.153 | −0.121 | Hs.591601 | 2 | Pneumonia | 171 |
| R42593 | 0.0207 | 0.154 | −0.122 | Hs.80395 | 2 | Pneumonia | 172 |
| R42778 | 0.0077 | 0.215 | −0.17 | Hs.553877 | 2 | Pneumonia | 173 |
| R43910 | 0.0009 | 0.398 | −0.315 | Hs.586760 | 2 | Pneumonia | 174 |
| R46801 | 0.0070 | −0.172 | 0.136 | Hs.343664 | 2 | Pneumonia | 175 |
| R49244 | 0.0078 | 0.125 | −0.099 | Hs.443258 | 2 | Pneumonia | 176 |
| R50755 | 0.0000 | 0.192 | −0.152 | Hs.633191 | 2 | Pneumonia | 177 |
| R60898 | 0.0032 | 0.136 | −0.108 | Hs.568242 | 2 | Pneumonia | 178 |
| R62926 | 0.0257 | 0.169 | −0.134 | Hs.285193 | 2 | Pneumonia | 179 |
| R79239 | 0.0087 | 0.18 | −0.143 | Hs.530588 | 2 | Pneumonia | 180 |
| R80259 | 0.0020 | 0.16 | −0.126 | Hs.595477 | 2 | Pneumonia | 181 |
| TGFB1 | 0.0136 | −0.122 | 0.097 | Hs.155218 | 2 | Pneumonia | 182 |
| W88496 | 0.0318 | 0.214 | −0.17 | Hs.314413 | 2 | Pneumonia | 183 |
| X57817 | 0.0119 | −0.639 | 0.506 | Hs.561078 | 2 | Pneumonia | 184 |
| XM-006953 | 0.0341 | 0.208 | −0.165 | Hs.355307 | 2 | Pneumonia | 185 |
| XM-028642 | 0.0149 | −0.175 | 0.139 | Hs.505654 | 2 | Pneumonia | 186 |
| XM-033972 | 0.0496 | −0.121 | 0.096 | Hs.492740 | 2 | Pneumonia | 187 |
| XM-034166 | 0.0028 | 0.149 | −0.118 | Hs.462525 | 2 | Pneumonia | 188 |
| XM-041844 | 0.0194 | 0.159 | −0.126 | Hs.36 | 2 | Pneumonia | 189 |
| XM-049849 | 0.0006 | 0.219 | −0.174 | Hs.512898 | 2 | Pneumonia | 190 |
| XM-057131 | 0.0000 | −0.313 | 0.248 | Hs.525157 | 2 | Pneumonia | 191 |

TABLE 4
Common set of sequences with similar significant gene activity in
patients with severe infections which are specific for a local inflammation, but not
for peritonitis or pneumonia of a “fever of unknown origin”.

| | | | normalized and transformed | | | | | |
|---|---|---|---|---|---|---|---|---|
| GenBank | | | expression signals | | | | | |
| Accession | p value | p value | mean patient | mean patient | mean patient | | | |
| Nummer | (patient group 1a) | (patient group 1b) | group 2 | group 1a | group 1b | UniGene | Cluster | SeqID |
| AA035428 | 0.006 | 0.007 | 0.15 | −0.17 | −0.15 | Hs.437006 | 3 | 192 |
| AA044390 | 0.015 | 0 | −0.22 | 0.27 | 0.27 | Hs.516217 | 3 | 193 |
| AA046302 | 0.032 | 0 | 0.15 | −0.17 | −0.35 | Hs.21611 | 3 | 194 |
| AA059314 | 0.037 | 0.011 | 0.15 | −0.18 | −0.22 | Hs.433445 | 3 | 195 |
| AA151104 | 0.001 | 0 | 0.24 | −0.29 | −0.29 | Hs.73454 | 3 | 196 |
| AA397913 | 0.006 | 0.04 | −0.12 | 0.14 | 0.11 | Hs.549040 | 3 | 197 |
| AA398331 | 0.018 | 0.007 | 0.16 | −0.19 | −0.2 | Hs.599407 | 3 | 198 |
| AA400790 | 0.011 | 0.006 | 0.22 | −0.26 | −0.24 | Hs.127999 | 3 | 199 |
| AA418841 | 0.039 | 0.03 | −0.16 | 0.19 | 0.13 | Hs.475319 | 3 | 200 |
| AA425808 | 0 | 0.005 | 0.22 | −0.27 | −0.14 | | 3 | 201 |
| AA426618 | 0.008 | 0.007 | 0.16 | −0.19 | −0.15 | Hs.585398 | 3 | 202 |
| AA455638 | 0.045 | 0.007 | −0.14 | 0.17 | 0.19 | Hs.444332 | 3 | 203 |
| AA461499 | 0.029 | 0.014 | 0.14 | −0.16 | −0.15 | Hs.99546 | 3 | 204 |
| AA478985 | 0.012 | 0.008 | 0.17 | −0.2 | −0.15 | Hs.279784 | 3 | 205 |
| AA514237 | 0 | 0.001 | −0.23 | 0.28 | 0.19 | Hs.147880 | 3 | 206 |
| AA620760 | 0.007 | 0.016 | 0.21 | −0.25 | −0.21 | Hs.633241 | 3 | 207 |
| AA682790 | 0.002 | 0.04 | 0.16 | −0.19 | −0.11 | | 3 | 208 |
| AA702492 | 0 | 0.002 | −0.29 | 0.35 | 0.17 | Hs.368563 | 3 | 209 |
| AA703200 | 0.01 | 0.001 | 0.17 | −0.2 | −0.18 | Hs.597767 | 3 | 210 |
| AA740907 | 0.004 | 0 | 0.15 | −0.18 | −0.27 | Hs.88297 | 3 | 211 |
| AA759092 | 0.016 | 0.025 | 0.11 | −0.14 | −0.15 | Hs.121439 | 3 | 212 |
| AA781411 | 0.005 | 0.021 | 0.16 | −0.2 | −0.12 | Hs.166015 | 3 | 213 |
| AA807376 | 0.009 | 0.015 | 0.14 | −0.17 | −0.17 | Hs.370414 | 3 | 214 |
| AA813145 | 0.018 | 0 | 0.16 | −0.19 | −0.38 | Hs.601872 | 3 | 215 |
| AA845015 | 0.041 | 0.02 | 0.12 | −0.15 | −0.13 | Hs.631866 | 3 | 216 |
| AA845475 | 0 | 0.022 | −0.2 | 0.24 | 0.1 | Hs.487393 | 3 | 217 |
| AA860398 | 0.014 | 0.018 | 0.12 | −0.14 | −0.15 | Hs.569748 | 3 | 218 |
| AA894523 | 0.013 | 0 | 0.13 | −0.15 | −0.18 | Hs.10734 | 3 | 219 |
| AA947111 | 0.004 | 0.006 | 0.13 | −0.15 | −0.11 | Hs.562136 | 3 | 220 |
| ADRB1 | 0 | 0 | −0.2 | 0.24 | 0.25 | Mm.46797 | 3 | 221 |
| AHSG | 0.022 | 0.02 | 0.22 | −0.26 | −0.18 | Hs.324746 | 3 | 222 |
| AI023558 | 0.001 | 0.001 | 0.15 | −0.18 | −0.17 | Hs.131417 | 3 | 223 |
| AI041544 | 0 | 0 | −0.22 | 0.26 | 0.16 | Hs.575480 | 3 | 224 |
| AI091867 | 0 | 0 | −0.22 | 0.26 | 0.24 | Hs.631761 | 3 | 225 |
| AI093704 | 0.009 | 0.012 | −0.18 | 0.21 | 0.19 | Hs.603146 | 3 | 226 |
| AI097494 | 0.002 | 0.005 | 0.17 | −0.21 | −0.16 | Hs.307984 | 3 | 227 |
| AI148246 | 0.024 | 0.004 | 0.14 | −0.17 | −0.18 | Hs.474251 | 3 | 228 |
| AI167874 | 0.006 | 0.002 | 0.13 | −0.15 | −0.16 | Hs.71023 | 3 | 229 |
| AI203091 | 0.016 | 0.027 | 0.13 | −0.15 | −0.12 | Hs.604090 | 3 | 230 |
| AI203697 | 0.001 | 0.016 | −0.15 | 0.18 | 0.09 | Hs.567342 | 3 | 231 |
| AI220662 | 0.049 | 0.019 | −0.12 | 0.15 | 0.1 | Hs.508720 | 3 | 232 |
| AI222359 | 0.005 | 0.003 | 0.23 | −0.28 | −0.29 | Hs.556230 | 3 | 233 |
| AI223092 | 0.004 | 0.015 | 0.16 | −0.19 | −0.18 | Hs.147880 | 3 | 234 |
| AI264626 | 0.001 | 0.005 | 0.16 | −0.19 | −0.12 | | 3 | 235 |
| AI267659 | 0.026 | 0.031 | 0.13 | −0.15 | −0.11 | | 3 | 236 |
| AI271764 | 0 | 0.003 | −0.31 | 0.37 | 0.28 | Hs.446357 | 3 | 237 |
| AI342905 | 0.032 | 0.04 | 0.15 | −0.18 | −0.17 | Hs.604613 | 3 | 238 |
| AI357099 | 0.005 | 0.025 | 0.28 | −0.34 | −0.26 | Hs.584910 | 3 | 239 |
| AI373295 | 0.012 | 0.034 | 0.15 | −0.18 | −0.13 | Hs.544825 | 3 | 240 |
| AI373525 | 0.018 | 0.001 | 0.11 | −0.13 | −0.14 | Hs.539391 | 3 | 241 |
| AI378275 | 0.006 | 0.018 | 0.18 | −0.21 | −0.15 | Hs.61271 | 3 | 242 |
| AI453476 | 0.02 | 0.031 | 0.15 | −0.18 | −0.14 | Hs.168677 | 3 | 243 |
| AI478776 | 0.001 | 0.042 | −0.18 | 0.22 | 0.15 | | 3 | 244 |
| AI539271 | 0.027 | 0.016 | 0.19 | −0.23 | −0.23 | Hs.478000 | 3 | 245 |
| AI554283 | 0.043 | 0.021 | 0.14 | −0.17 | −0.16 | Hs.420529 | 3 | 246 |
| AI565469 | 0.015 | 0 | 0.16 | −0.19 | −0.22 | Hs.638685 | 3 | 247 |
| AI582909 | 0 | 0 | 0.2 | −0.24 | −0.22 | Hs.578450 | 3 | 248 |
| AI589096 | 0.002 | 0.036 | −0.23 | 0.27 | 0.18 | Hs.638946 | 3 | 249 |
| AI590144 | 0.003 | 0.022 | 0.27 | −0.33 | −0.24 | Hs.508848 | 3 | 250 |
| AI613038 | 0.012 | 0 | −0.15 | 0.17 | 0.26 | | 3 | 251 |
| AI627286 | 0.008 | 0.003 | 0.12 | −0.14 | −0.14 | Hs.191073 | 3 | 252 |
| AI628322 | 0.006 | 0.038 | 0.22 | −0.27 | −0.12 | Hs.530538 | 3 | 253 |
| AI652609 | 0.027 | 0.012 | 0.12 | −0.14 | −0.12 | Hs.567425 | 3 | 254 |
| AI692869 | 0.002 | 0.028 | 0.24 | −0.28 | −0.19 | Hs.202419 | 3 | 255 |
| AI696291 | 0.027 | 0.033 | 0.21 | −0.25 | −0.25 | Hs.528671 | 3 | 256 |
| AI700444 | 0.029 | 0.019 | 0.18 | −0.21 | −0.23 | Hs.564343 | 3 | 257 |
| AI733177 | 0 | 0.004 | −0.22 | 0.27 | 0.22 | Hs.421340 | 3 | 258 |
| AI733269 | 0 | 0.003 | −0.26 | 0.31 | 0.18 | Hs.418045 | 3 | 259 |
| AI733498 | 0.045 | 0.001 | 0.16 | −0.19 | −0.32 | Hs.573606 | 3 | 260 |
| AI738831 | 0 | 0.032 | 0.26 | −0.32 | −0.14 | Hs.268606 | 3 | 261 |
| AI739381 | 0.005 | 0.004 | 0.14 | −0.16 | −0.2 | Hs.512763 | 3 | 262 |
| AI742529 | 0 | 0.003 | −0.22 | 0.27 | 0.16 | Hs.591095 | 3 | 263 |
| AI799137 | 0.048 | 0.006 | −0.16 | 0.19 | 0.27 | Hs.432690 | 3 | 264 |
| AI808410 | 0.006 | 0.008 | −0.16 | 0.19 | 0.15 | Hs.233955 | 3 | 265 |
| AI859370 | 0.027 | 0.015 | 0.12 | −0.14 | −0.14 | Hs.607181 | 3 | 266 |
| AI859777 | 0.013 | 0.011 | 0.22 | −0.26 | −0.25 | Hs.301819 | 3 | 267 |
| AI860121 | 0.001 | 0.004 | −0.21 | 0.25 | 0.23 | Hs.501684 | 3 | 268 |
| AI889310 | 0 | 0 | −0.21 | 0.25 | 0.17 | Hs.511903 | 3 | 269 |
| AI890962 | 0.026 | 0.017 | 0.13 | −0.16 | −0.12 | Hs.25601 | 3 | 270 |
| AI913322 | 0.009 | 0.023 | −0.24 | 0.29 | 0.19 | Hs.107740 | 3 | 271 |
| AI924028 | 0.003 | 0.003 | 0.28 | −0.34 | −0.27 | Hs.326391 | 3 | 272 |
| AI924296 | 0.017 | 0.041 | 0.11 | −0.13 | −0.11 | Hs.487479 | 3 | 273 |
| AI925451 | 0.046 | 0.008 | 0.16 | −0.19 | −0.18 | Hs.629605 | 3 | 274 |
| AI926659 | 0.001 | 0.04 | −0.23 | 0.27 | 0.15 | Hs.363558 | 3 | 275 |
| AI933607 | 0 | 0.002 | −0.25 | 0.31 | 0.17 | Hs.632296 | 3 | 276 |
| AI936462 | 0.016 | 0.012 | −0.13 | 0.16 | 0.11 | | 3 | 277 |
| ARHA | 0.001 | 0.004 | −0.18 | 0.22 | 0.13 | Hs.247077 | 3 | 278 |
| ASC | 0.001 | 0.014 | −0.2 | 0.24 | 0.11 | Hs.499094 | 3 | 279 |
| B3GALT3 | 0.005 | 0.01 | 0.21 | −0.25 | −0.18 | Hs.418062 | 3 | 280 |
| BC013302 | 0.003 | 0.033 | −0.13 | 0.16 | 0.08 | Hs.437594 | 3 | 281 |
| BC021289 | 0.023 | 0.005 | −0.27 | 0.33 | 0.27 | Hs.75431 | 3 | 282 |
| BC024270 | 0 | 0.017 | −0.15 | 0.18 | 0.13 | Hs.136164 | 3 | 283 |
| BCL6 | 0.003 | 0.011 | −0.26 | 0.32 | 0.21 | Hs.636990 | 3 | 284 |
| BZRP | 0 | 0 | −0.47 | 0.56 | 0.37 | Hs.202 | 3 | 285 |
| BZRP.1 | 0.002 | 0 | −0.34 | 0.41 | 0.35 | Hs.202 | 3 | 286 |
| C1QBP | 0 | 0.001 | −0.24 | 0.28 | 0.23 | Hs.622699 | 3 | 287 |
| C1S | 0.015 | 0.037 | 0.12 | −0.15 | −0.09 | Hs.458355 | 3 | 288 |
| C8B | 0.005 | 0 | 0.13 | −0.16 | −0.2 | Hs.391835 | 3 | 289 |
| C9 | 0 | 0.001 | −0.25 | 0.3 | 0.15 | Hs.481980 | 3 | 290 |
| CCR7 | 0.037 | 0.024 | 0.11 | −0.13 | −0.12 | Hs.370036 | 3 | 291 |
| CD59 | 0.007 | 0.015 | −0.2 | 0.24 | 0.17 | Hs.633297 | 3 | 292 |
| CDKN1A | 0.049 | 0.007 | −0.12 | 0.14 | 0.18 | Hs.370771 | 3 | 293 |
| CKM | 0.004 | 0.003 | 0.2 | −0.24 | −0.22 | Hs.334347 | 3 | 294 |
| EDARADD | 0 | 0 | −0.24 | 0.29 | 0.2 | Hs.352224 | 3 | 295 |
| EPB41 | 0.018 | 0.013 | 0.2 | −0.25 | −0.25 | Hs.175437 | 3 | 296 |
| FADD | 0 | 0.009 | −0.21 | 0.25 | 0.12 | Hs.86131 | 3 | 297 |
| FLOT2 | 0 | 0 | −0.35 | 0.42 | 0.29 | Hs.514038 | 3 | 298 |
| G3BP2 | 0.001 | 0.003 | −0.19 | 0.23 | 0.22 | Hs.593867 | 3 | 299 |
| GADD45A | 0.001 | 0.007 | −0.27 | 0.33 | 0.21 | Hs.80409 | 3 | 300 |
| H16716 | 0.002 | 0 | −0.25 | 0.31 | 0.25 | Hs.448889 | 3 | 301 |
| H18435 | 0.012 | 0.001 | 0.18 | −0.22 | −0.31 | | 3 | 302 |
| H18649 | 0 | 0.007 | 0.29 | −0.34 | −0.19 | | 3 | 303 |
| H23819 | 0.015 | 0.004 | 0.17 | −0.2 | −0.22 | Hs.59093 | 3 | 304 |
| H30516 | 0.012 | 0.031 | 0.17 | −0.2 | −0.14 | Hs.482411 | 3 | 305 |
| H44908 | 0 | 0 | −0.28 | 0.34 | 0.23 | Hs.591171 | 3 | 306 |
| H61449 | 0.009 | 0 | 0.13 | −0.15 | −0.18 | Hs.528368 | 3 | 307 |
| H98244 | 0.001 | 0.019 | 0.23 | −0.28 | −0.17 | Hs.143707 | 3 | 308 |
| H99099 | 0.003 | 0.029 | −0.22 | 0.26 | 0.17 | Hs.205742 | 3 | 309 |
| HSPA1A | 0.011 | 0.019 | −0.16 | 0.19 | 0.13 | Hs.520028 | 3 | 310 |
| HSPA8.1 | 0.005 | 0.006 | −0.2 | 0.23 | 0.23 | Hs.180414 | 3 | 311 |
| HSPB1 | 0 | 0.013 | −0.41 | 0.5 | 0.14 | Hs.520973 | 3 | 312 |
| ICAM5 | 0.003 | 0.003 | −0.13 | 0.15 | 0.13 | Hs.465862 | 3 | 313 |
| IFNA5 | 0.012 | 0 | −0.16 | 0.19 | 0.21 | Hs.37113 | 3 | 314 |
| IKBKG | 0.001 | 0 | −0.13 | 0.16 | 0.14 | Hs.43505 | 3 | 315 |
| IL10RB | 0 | 0.004 | −0.23 | 0.28 | 0.17 | Hs.512211 | 3 | 316 |
| IL12B | 0.036 | 0.015 | 0.32 | −0.39 | −0.28 | Hs.674 | 3 | 317 |
| IL1RN | 0.002 | 0 | −0.31 | 0.37 | 0.27 | Hs.594611 | 3 | 318 |
| IL2RG | 0 | 0.013 | −0.24 | 0.29 | 0.12 | Hs.84 | 3 | 319 |
| IL6R | 0.002 | 0.001 | −0.16 | 0.19 | 0.19 | Hs.591492 | 3 | 320 |
| IL7R | 0.019 | 0.04 | 0.21 | −0.26 | −0.17 | Hs.591742 | 3 | 321 |
| M37435 | 0.013 | 0.017 | −0.13 | 0.15 | 0.13 | Hs.173894 | 3 | 322 |
| M61199 | 0.003 | 0.028 | −0.22 | 0.26 | 0.16 | Hs.591602 | 3 | 323 |
| MAP3K11 | 0.024 | 0.01 | −0.14 | 0.16 | 0.13 | Hs.502872 | 3 | 324 |
| MAP3K6 | 0.032 | 0.041 | −0.12 | 0.15 | 0.11 | Hs.194694 | 3 | 325 |
| MAPK14 | 0 | 0.004 | −0.24 | 0.28 | 0.19 | Hs.588289 | 3 | 326 |
| MAPK14.3 | 0 | 0.001 | −0.26 | 0.31 | 0.25 | Hs.588289 | 3 | 327 |
| MAPK8.3 | 0.025 | 0.016 | 0.11 | −0.13 | −0.14 | Hs.138211 | 3 | 328 |
| MYD88 | 0 | 0 | −0.25 | 0.3 | 0.25 | Hs.82116 | 3 | 329 |
| MYL2 | 0.032 | 0 | −0.17 | 0.2 | 0.23 | Hs.491359 | 3 | 330 |
| N32857 | 0.004 | 0.02 | −0.54 | 0.65 | 0.45 | Hs.491767 | 3 | 331 |
| N51537 | 0.042 | 0.002 | 0.15 | −0.18 | −0.19 | Hs.525485 | 3 | 332 |
| N52915 | 0.005 | 0 | 0.16 | −0.19 | −0.18 | | 3 | 333 |
| N53973 | 0.014 | 0.006 | 0.13 | −0.16 | −0.15 | Hs.585782 | 3 | 334 |
| N67859 | 0.004 | 0.041 | −0.16 | 0.19 | 0.12 | Hs.125829 | 3 | 335 |
| NET1 | 0.021 | 0.013 | −0.11 | 0.13 | 0.13 | Hs.610771 | 3 | 336 |
| NM_001540 | 0 | 0.013 | −0.2 | 0.24 | 0.13 | Hs.626419 | 3 | 337 |
| NM_003258 | 0.005 | 0 | −0.21 | 0.25 | 0.27 | Hs.515122 | 3 | 338 |
| NM_006936 | 0.001 | 0.001 | −0.25 | 0.3 | 0.2 | Hs.474005 | 3 | 339 |
| NM_016184 | 0.017 | 0.022 | 0.22 | −0.27 | −0.24 | Hs.504657 | 3 | 340 |
| NM_025139 | 0.014 | 0.003 | 0.19 | −0.23 | −0.29 | Hs.471610 | 3 | 341 |
| NM_031311 | 0 | 0.024 | 0.5 | −0.6 | −0.24 | Hs.233389 | 3 | 342 |
| NM-000061 | 0.005 | 0.047 | −0.15 | 0.18 | 0.1 | Hs.159494 | 3 | 343 |
| NM-000584 | 0.017 | 0.007 | −0.18 | 0.21 | 0.21 | Hs.632880 | 3 | 344 |
| NM-000760 | 0.002 | 0.011 | −0.18 | 0.21 | 0.13 | Hs.524517 | 3 | 345 |
| NM-001013 | 0.015 | 0.027 | −0.11 | 0.13 | 0.11 | Hs.546288 | 3 | 346 |
| NM-001101 | 0 | 0 | −0.27 | 0.33 | 0.19 | Hs.593869 | 3 | 347 |
| NM-001288 | 0.007 | 0.001 | −0.14 | 0.17 | 0.18 | Mm.388801 | 3 | 348 |
| NM-001315 | 0 | 0.001 | −0.25 | 0.3 | 0.22 | Hs.588289 | 3 | 349 |
| NM-001569 | 0.001 | 0.012 | −0.16 | 0.19 | 0.11 | Hs.522819 | 3 | 350 |
| NM-001765 | 0.041 | 0.005 | −0.12 | 0.14 | 0.16 | Hs.1311 | 3 | 351 |
| NM-001772 | 0.018 | 0.004 | −0.12 | 0.14 | 0.12 | Hs.83731 | 3 | 352 |
| NM-002128 | 0.009 | 0.044 | −0.2 | 0.24 | 0.15 | Hs.593339 | 3 | 353 |
| NM-002394 | 0 | 0.012 | −0.19 | 0.23 | 0.12 | Hs.502769 | 3 | 354 |
| NM-002401 | 0.037 | 0.003 | −0.14 | 0.17 | 0.17 | Hs.29282 | 3 | 355 |
| NM-002415 | 0 | 0.025 | −0.24 | 0.28 | 0.14 | Hs.632781 | 3 | 356 |
| NM-002953 | 0 | 0 | −0.19 | 0.23 | 0.21 | Hs.149957 | 3 | 357 |
| NM-003153 | 0 | 0.041 | −0.2 | 0.24 | 0.13 | Hs.524518 | 3 | 358 |
| NM-003268 | 0 | 0.005 | −0.31 | 0.38 | 0.45 | Hs.135853 | 3 | 359 |
| NM-003684 | 0.017 | 0.001 | −0.17 | 0.2 | 0.16 | Hs.371594 | 3 | 360 |
| NM-004257 | 0 | 0 | −0.25 | 0.3 | 0.19 | Hs.446350 | 3 | 361 |
| NM-004635 | 0.02 | 0.031 | −0.1 | 0.12 | 0.11 | Hs.624942 | 3 | 362 |
| NM-004740 | 0 | 0.001 | −0.25 | 0.3 | 0.19 | Hs.462590 | 3 | 363 |
| NM-005620 | 0.001 | 0.001 | −0.23 | 0.27 | 0.22 | Hs.547382 | 3 | 364 |
| NM-005803 | 0.002 | 0.001 | −0.15 | 0.18 | 0.15 | Hs.179986 | 3 | 365 |
| NM-007328 | 0.005 | 0 | 0.36 | −0.43 | −0.38 | Hs.512576 | 3 | 366 |
| NM-018643 | 0 | 0.035 | 0.39 | −0.47 | −0.14 | Hs.283022 | 3 | 367 |
| NM-138556 | 0.03 | 0.009 | 0.17 | −0.2 | −0.1 | Hs.174312 | 3 | 368 |
| PPGB | 0 | 0.015 | −0.22 | 0.26 | 0.14 | Hs.609336 | 3 | 369 |
| PPP4C | 0 | 0 | −0.19 | 0.23 | 0.15 | Hs.534338 | 3 | 370 |
| PRP4.1 | 0.035 | 0.005 | −0.2 | 0.24 | 0.24 | Mm.10027 | 3 | 371 |
| R00742 | 0.007 | 0.037 | 0.16 | −0.19 | −0.15 | Hs.275675 | 3 | 372 |
| R05804 | 0.034 | 0.02 | 0.12 | −0.15 | −0.14 | Hs.348308 | 3 | 373 |
| R26635 | 0 | 0.041 | −0.49 | 0.59 | 0.16 | Hs.178499 | 3 | 374 |
| R37251 | 0.033 | 0.038 | −0.16 | 0.19 | 0.17 | Hs.479099 | 3 | 375 |
| R39782 | 0 | 0.002 | 0.22 | −0.26 | −0.2 | Hs.21145 | 3 | 376 |
| R40406 | 0.022 | 0.035 | −0.14 | 0.16 | 0.2 | Hs.2853 | 3 | 377 |
| R42461 | 0.004 | 0.008 | −0.2 | 0.23 | 0.26 | Hs.579115 | 3 | 378 |
| R42782 | 0.026 | 0.017 | −0.17 | 0.21 | 0.14 | Hs.434971 | 3 | 379 |
| R43203 | 0.011 | 0.027 | 0.3 | −0.36 | −0.25 | Hs.73828 | 3 | 380 |
| R43722 | 0.033 | 0.032 | −0.2 | 0.23 | 0.21 | | 3 | 381 |
| R45159 | 0 | 0 | 0.23 | −0.28 | −0.22 | Hs.271285 | 3 | 382 |
| R45355 | 0 | 0 | −0.18 | 0.21 | 0.2 | Hs.201805 | 3 | 383 |
| R52949 | 0.024 | 0.035 | 0.16 | −0.19 | −0.17 | Hs.622398 | 3 | 384 |
| R54442 | 0.001 | 0.006 | 0.24 | −0.28 | −0.23 | Hs.416139 | 3 | 385 |
| R56890 | 0.011 | 0.002 | 0.14 | −0.16 | −0.14 | Hs.592205 | 3 | 386 |
| R58974 | 0.033 | 0.034 | 0.13 | −0.16 | −0.2 | Hs.335205 | 3 | 387 |
| R84393 | 0.027 | 0.023 | 0.15 | −0.17 | −0.11 | Hs.387255 | 3 | 388 |
| R89802 | 0.006 | 0 | 0.18 | −0.22 | −0.17 | Hs.93670 | 3 | 389 |
| RAC1 | 0.01 | 0.01 | −0.11 | 0.13 | 0.14 | Hs.413812 | 3 | 390 |
| RAC3 | 0 | 0 | −0.35 | 0.41 | 0.26 | Hs.45002 | 3 | 391 |
| SERCA2-2 | 0 | 0.004 | −0.17 | 0.2 | 0.15 | Hs.633656 | 3 | 392 |
| SPTLC2 | 0 | 0.007 | −0.19 | 0.23 | 0.2 | Hs.435661 | 3 | 393 |
| T65410 | 0.018 | 0.042 | −0.2 | 0.24 | 0.19 | Hs.125116 | 3 | 394 |
| T90460 | 0.005 | 0.023 | −0.15 | 0.18 | 0.12 | Hs.102471 | 3 | 395 |
| T91086 | 0.044 | 0.015 | 0.2 | −0.24 | −0.21 | | 3 | 396 |
| T91795 | 0.038 | 0.041 | 0.14 | −0.17 | −0.16 | Hs.502872 | 3 | 397 |
| T95815 | 0.038 | 0.032 | 0.09 | −0.11 | −0.12 | Hs.336994 | 3 | 398 |
| TNFSF14 | 0.004 | 0.001 | 0.13 | −0.16 | −0.17 | Hs.129708 | 3 | 399 |
| TNFSF9 | 0.001 | 0.03 | −0.19 | 0.22 | 0.14 | Hs.1524 | 3 | 400 |
| TRAF3 | 0.014 | 0.041 | −0.15 | 0.18 | 0.11 | Hs.510528 | 3 | 401 |
| U07802 | 0.004 | 0.023 | 0.24 | −0.28 | −0.26 | Hs.503093 | 3 | 402 |
| UGCG | 0.009 | 0 | −0.26 | 0.31 | 0.53 | Hs.304249 | 3 | 403 |
| W86767 | 0.046 | 0.001 | 0.1 | −0.12 | −0.17 | Hs.632594 | 3 | 404 |
| X05875 | 0.011 | 0.021 | −0.37 | 0.45 | 0.23 | Hs.99863 | 3 | 405 |
| X64641 | 0.004 | 0.015 | −0.46 | 0.56 | 0.44 | Hs.449621 | 3 | 406 |
| XM-003937 | 0.002 | 0.001 | 0.26 | −0.32 | −0.38 | Hs.591258 | 3 | 407 |
| XM-004256 | 0.014 | 0 | −0.31 | 0.38 | 0.6 | Hs.606320 | 3 | 408 |
| XM-006867 | 0.002 | 0.001 | −0.19 | 0.22 | 0.19 | Hs.591014 | 3 | 409 |
| XM-007417 | 0.031 | 0.016 | 0.1 | −0.12 | −0.27 | Hs.636674 | 3 | 410 |
| XM-008679 | 0.009 | 0.019 | −0.28 | 0.33 | 0.24 | Hs.408312 | 3 | 411 |
| XM-009475 | 0.001 | 0.001 | −0.36 | 0.44 | 0.4 | Hs.388004 | 3 | 412 |
| XM-012039 | 0 | 0.004 | −0.28 | 0.33 | 0.24 | Hs.568921 | 3 | 413 |
| XM-015278 | 0 | 0.001 | −0.19 | 0.23 | 0.21 | Hs.334019 | 3 | 414 |
| XM-015396 | 0 | 0 | −0.41 | 0.49 | 0.35 | Hs.507658 | 3 | 415 |
| XM-015815 | 0.008 | 0.007 | −0.23 | 0.27 | 0.25 | Hs.509067 | 3 | 416 |
| XM-027358 | 0 | 0.042 | −0.29 | 0.35 | 0.16 | Hs.592992 | 3 | 417 |
| XM-030326 | 0.002 | 0.021 | −0.22 | 0.26 | 0.17 | Hs.626357 | 3 | 418 |
| XM-030906 | 0 | 0 | −0.23 | 0.27 | 0.22 | Hs.155218 | 3 | 419 |
| XM-031242 | 0 | 0 | −0.25 | 0.3 | 0.29 | Hs.527778 | 3 | 420 |
| XM-033862 | 0.004 | 0.001 | −0.13 | 0.15 | 0.14 | Hs.181128 | 3 | 421 |
| XM-038024 | 0.024 | 0.033 | 0.14 | −0.17 | −0.11 | Hs.318547 | 3 | 422 |
| XM-041101 | 0.004 | 0 | −0.19 | 0.22 | 0.18 | Hs.504877 | 3 | 423 |
| XM-042066 | 0.006 | 0.025 | −0.14 | 0.17 | 0.15 | Hs.508461 | 3 | 424 |
| XM-046575 | 0.028 | 0.007 | 0.18 | −0.21 | −0.2 | Hs.562457 | 3 | 425 |
| XM-047570 | 0 | 0 | −0.26 | 0.32 | 0.21 | Hs.495912 | 3 | 426 |
| XM-048068 | 0.001 | 0 | −0.24 | 0.29 | 0.23 | Hs.531668 | 3 | 427 |
| XM-052636 | 0 | 0 | −0.27 | 0.32 | 0.23 | Hs.634911 | 3 | 428 |
| XM-055188 | 0.029 | 0.011 | −0.17 | 0.2 | 0.18 | Hs.76753 | 3 | 429 |
| XM-056556 | 0 | 0.019 | −0.34 | 0.41 | 0.17 | Hs.501497 | 3 | 430 |
| XM-057356 | 0 | 0.009 | −0.22 | 0.26 | 0.23 | Hs.268675 | 3 | 431 |
| XM-114018 | 0.001 | 0.012 | −0.17 | 0.21 | 0.12 | Hs.591382 | 3 | 432 |

[0087] Thus, the specific gene activity cluster 1 and 2 ascertained are usable for the invention for establishing peritonitis or pneumonia as local inflammation for “fever of unknown origin”.

[0088] The gene activity cluster 3 is usable for the invention for establishing a local inflammation of a FUO which is not peritonitis or pneumonia.

### REFERENCES

[0089] 1. Roth A. R., Basello, D. O., (2003), Approach to the adult patient with fever of unknown origin. Am. Fam. Phys., 68(11), 2223-2228.
[0090] 2. Amin K., Kauffman C. A., (2003), Fever of unknown origin, postgrad, med., 114(3), 69-75.
[0091] 3. Mourad, O., Palda, V., Detsky, A. S., (2003), A comprehensive evidence-based approach to fever of unknown origin. Arch. Intern. Med. 163, 545-551.
[0092] 4. Liu, K. S. Shen. W. S. Chen. Y. C:, Chang. S. C., Hsieh, W. C., (2003), Fever of unknown origin: a retrospective study of 78 adult patients in Taiwan, J. Microbiol. Immunol. Infect., 36, 243-247.
[0093] 5. Pile, J. C., (2006), Evaluating postoperative fever,: a focused approach, Clev. Clin. J. Med. 73 (supp.1), S62-S66.
[0094] 6. Sauer, H-J., (2001), Surveillance nosokomialer Infektionen auf Intensivstationen-Etablierung einer computergestiizten Infektionserfassung und-auswertung auf einer interdiziplinären 16-Betten-Intensivstation (surveillance of nosocomial infections on intensive care units—establishment of a computer-based recordation and analysis of infections on an interdisciplinary intensive care unit with 16 beds), MD thesis, Halle (Saale), Martin-Luther-University Halle-Wittenberg, Faculty of Medicine.
[0095] 7. Vincent, J-L. Biharin D. J., Suter, P. M., Braining, H. A., White J., Nicolas-Chanoin, M-H., Wolff. M., Spencer, R. C:, Hemmer. M. (2000), the prevalence of nosocomial infection in intensive care units in Europe: Results of the European prevalence of infection in intensive care (EPIC) study, JAMA, 37, 454-460.
[0096] 8. Welte, T., Marre, R., Suttorp, R, (2004), Das Kompetenznetzwerk “Ambulant erworbene Pneumonie” (The competence network “ambulantory-acquired pneumonia”) (CAPNETZ). Internist, 45, 393-401.
[0097] 9. Unertl, K. Heiniger, A., Ventilator-associated Pneumonia, http://www.tu-dresden.de/medkai/unertl.pdf
[0098] 10. Patel, P. J., Leeper Jr. K. V., McGowan Jr, J. E., (2002). Epidemiology and microbiology of hospital-acquired pneumonia, Semin. Respir. Crit. Care Med., 23(5). 415-425.
[0099] 11. Park, D. R., The microbiology of ventilator-associated Pneumonia, Respir. Care, 50(86), 742-765.
[0100] 12. Hall. J. C., Heel, K. A., Papadimitriou, J. M. Platell C. (1998). The pathology of peritonitis, Gastroenterology, 114, 185-196.
[0101] 13. Troidle, L., Gorban-Brennan, N., Kliger, A., Finkelstein. F., (1998), Differing outcomes of Gram-positive and Gram-negative peritonitis. Am. J. Kidney Dis., 32(4), 623-628.
[0102] 14. Jonsson, B., Berlund, J., Skau, T., Nystrom, P. O., (1993), Outcome of intr-abdominal infection in pigs depends more on host responses than on microbiology, Eur. J. Surg., 159, 571-578.
[0103] 15. Cobb, P. J., Laramie, J. M., Stormo, G. D., Morrissey, J. J., Shannon. W. D., Qiu, Y., Karl, I., Buchman, T. G., Hotchkiss, R. S., (2002), Sepsis gene expression profiling: Murine splenic compared with hepatic responses determined using complementary microarrays, Crit. Care Med., 30(12), 2711-2721.
[0104] 16. Jonhson. S. B., (2006), Gene expression profiles differentiate between SIRS and early Sepsis, 126th Annual Meeting, American Surgical Assoc., Boston.
[0105] 17. Mclean, A., (2006), Use of signature genes to diagnose sepsis in patients with SIRS, 26th International Symposium on Intensive Care and Emergency Medicine. Brussels.
[0106] 18. Prucha M, Ruryk A. Boriss H, Moller E, Zazula R. Herold I. Claus R A, Reinhart K A, Deigner P, Russwurm S. (2004), Expression profiling: toward an application in sepsis diagnostics. Shock. 22(1):29-33.
[0107] 19. Domashowske J. B., Bonville C. A. Easton, A. J. Rosenberg H. F., (2002), Differential expression of pro-inflammatory cytokine genes in vivo in response to pathogenic and non-pathogenic pneumovirus infections., J. Infect. Dis., 186(1), 8-14.
[0108] 20. WO 2004/087949, Verfahren zur Erkennung akuter, generalisierter entziindlicher Zustände (SIRS), Sepsis, sepsisähnlichen Zuständen und systemischen Infektionen (Method for recognizing acute generalised inflammatory conditions (SIRS), sepsis, sepsis-like conditions and systemic infections)
[0109] 21. WO 03/002763, Use of a biochip for the diagnosis of sepsis or sepsis related syndrome
[0110] 22. DE 102004049897, Verfahren zur Unterscheidung zwischen nichtinfektiosen und infektiösen Ursachen eines Multiorganversagens (Method for differentiating between non-infectious and infectious causes of multiple organ failure)
[0111] 23. Marshall, D. R., Olivas, E., Andreansky, S.: La Gruta. N. L., Neale, G. A., Gutierrez, A., Wichlan, D. G., Cheng, C, Doherty, P. C., Turner, S. J. (2005), Effector CD8+ T cells recovered from influenza pneumonia differentiate to state of focused gene expression, Proc. Natl. Acad. Sci. USA. 102(17). 6074-6079.
[0112] 24. Selman, M., pardo, A., Barrera. L., Estradda. A., Watson, S. R., Wilson, K., Aziz. N., Kaminski, N., Zlotnik A., (2006), Gene expression profiles distinguish idiopathic pulmonary fibrosis from hypersensistivity pneumonitis, Am J. Respir. Crit. Care Med., 173(2), 188-198.
[0113] 25. Sandler, N. G., Menttink-Kane, M. M., Cheever. A. W., Wynn, T. A., (2003), Global gene expression profiles during acute pathogen-induced pulmonary I nil animation reveal divergent roles for Th1 snf Th2 responses in tissue repair, J. Immunol., 171, 3655-3667.
[0114] 26. Abdrejko. K. M. Deutschman, C. S, (1997), Altered hepatic gene expression in fecal peritonitis: changes in transcription of glucogenic, beta-oxidative, and ureagenic genes. Schock, 7(3), 164-169.
[0115] 27. US2006/0040301, Diagnostic assay for source of inflammation
[0116] 28. Rheinart K., (2005), The genetic response to sepsis—Can we use it to improve diagnosis?, 25th International Symposium on Intensive Care and Emergency Medicine, Brussels.
[0117] 29. DE 102005013013, Verwendung von Geneaktivitäts-Klassifikatoren für die in vitro Klassifizierung von Genexpressionsprofilen von Patienten mit infektiösem/nichtinfektiösem Multiorganversagen (use of gene activity classificators for in vitro classification of gene expression profiles of patients with infectious/non-infectious multiple organ failure)
[0118] 30. Bone R C, Balk R A, Cerra F B, et al. (1992) The ACCP/SCCM Consensus Conference Committee (1992) Definitions for Sepsis and organ failure and guidelines for the use of innovative therapies in Sepsis. Chest 101:1656-1662: und Crit. Care Med 1992; 20:864-874.
[0119] 31. Huber W, Heydebreck A, Sueltmann H. et al. (2003) Parameter estimation for the calibration and variance stabilization of microarray data. Stat. Appl. in Gen. and Mol. Biol. Vol. 2, Issue 1, Article 3

The application's sequence listing, which the Patent Office published only in electronic form, follows.

SEQUENCE LISTING (432 sequences)

SEQ ID NO: 1 - DNA, 484 bp, Homo sapiens
  misc_feature (82)..(82): n is a, c, g or t.
  misc_feature (139)..(139): n is a, c, g or t.
  misc_feature (449)..(449): n is a, c, g or t.
  misc_feature (469)..(469): n is a, c, g or t.
tttaggggaaaacattttaatatgtactatgaataatctcatctttataccaatatgtcttaaaatacattttttatggaangtgcagaggagggaggtccaaaagtgccaaaagcccatggaagtcacaatacatttnttcttttctccccacatgagtttctccatgttccaggaattttattatcagtctcagccttgctgttctgggcaggaagaaatgaaagaagaagaaaggaagccacgtctcctgaacactgccccgtgtgcccagcacagtgactgctgttgtgtagtcagcatctcttcggggaggacaggtgagtctccgagaagacatatccaatcagccgagcagcaattcaatcattgatctttaaaaaactagcccccaaaacataatgtcaagcagtggaaatggctatattggtcagggtataccccaatgncaagggtagtgctcaggggnccccagtatgactgg

SEQ ID NO: 2 - DNA, 232 bp, Homo sapiens
  misc_feature (172)..(172): n is a, c, g or t.
aaagtctctcaaaatgtttatttttgtcagaatagctgacaattttctgttaagtattttggtttattattataataagcatttcccccccttgaaaaatccattcaaaatatctcaaccattgaggtaaagcattttaactaaaaaaaaaaaaaaaaaaaaatcctaattngtttttaaagaaaaaaaaaaatcttaaaattcctttggcttgataaatagaaataatatc

SEQ ID NO: 3 - DNA, 370 bp, Homo sapiens
tttgtgtctatacataaagttttattagaactaagccaacttcatttatttgcatattgtctgtggctactttcacattataagagaatctaataaccttataacagaactattgagcatgatgttatgtttaggtgcaacagagacctacaatatttactatataactctttacagaagatgtctgccaacttctggattagagaaacagcttttaaaatctcattttctttcattttgaggaatgatttcgacatctctttatttattcatttttttctcagtctgtttgtgatgctataacagaacacctgagatagctcatttataaatcatagaaattcattggcctatggttctgggggctgga

SEQ ID NO: 4 - DNA, 3497 bp, Homo sapiens
ctttaatttaaaaattgagggccagttactagagacgtcaggtttatgtatcccagccaacaacaccctctttattgtctctattagtaagaccctggcagccaatgagccacacctcaccttagaatttttggaagagtgtatttctggatttagcaaatctagcttgttctctttcttcatctctgtcttcagtaatatatttgccaagtctcttttctccaggcctgattctaggtattgaattgaaacacctttgtttggagtacatgactccatggctatcaaatctagtacgtttttgtaagcacaacgatgatgccaagcgacagagagttactgcaattcttgataagctgataacaatgaccataaacgagaaacagatgtatccatctattcaagcaaaaatatgggggagccttgggcagattacagacctccttgatgttgtactagacagtttcatcaaaaccagtgcaacgggtggcttaggatcaataaaggctgaggtgatggcagatactgctgtagctttggcttctggaaatgtgaaattggtttcaagcaaggttattggaaggatgtgcaaaataattgacaagacatgcctatctccaactcctactttagagcaacatcttatgtgggatgacattgccattctggctcgctacatgctaatgctgtccttcaacaattccctggacgtggcagctcatctcccctacctcttccacgttgttactttcttagtagcaacagggccactctccctgagagcttccacacatggattggtcattaacatcattcactctctgtgtacttgttcacagcttcattttagtgaagagaccaagcaagttttgagactcagcttgacagagttctcattaccgaaattttacctgctatttggcattagcaaagtcaagtcagctgctgtcattgccttccgctccagctaccgggacaggtcattctctcctggctcctatgagagggagacttttgctttgacatccttggagacagtcacagaggctttgttggagatcatggaggcatgtatgagagatattccaacatgcaagtggctggaccaatggacagaactagcacaaagatttgcattccagtataacccgtccctgcaaccgagagctcttgttgtctttggctgtattagcaaacgagtgtctcatgggcagataaagcagattatccgtatcctcagcaaggctcttgagagttgcttaaaaggacctgatacttacaacagtcaagttctgatagaagctacagtaatagcactaaccaaattacaaccacttcttaataaggactcccctctgcacaaagccctcttttgggttgctgtagccgtgctacagctcgatgaggtcaacttgtattcagcaggcactgcacttctggaacaaaacctgcacaccttagacagtctcaggatattcaacgacaagagtccagaggaagtgttcatggcaatccggaaccctctggaatggcactgcaaacaaatggatcattttgttggactcaatttcaactctaactttaacttcgcactggttggacacctcttaaaaggatacaggcatccttcacctgccattgttgcaagaacagtcagaattttgcatacactactagctctggttaataaacacagaaattgtgacaaatttgaggtgaatacacagagcgtggcttacttggcagctttacttacagtgtctgaggaagttcgaagtcgctgtagcctaaaacatagaaagtctctgcttcttactgatatttcaatggaaaatgttcctatggatacatatcccattcatcatggtgaccctagctataggacactaaaggagcatcagccgtggtcatctcccaaagcttctgaagggtaccttgcagccagctatccacctgcgggccagaccagtccccgagccaggaaatctatgagcttggacatggggcagccttctcaggccaacacgaagaaattgcttggaacaaggaaaagttttgatcacttgatatcagacacaaaggctcctaaaaggcaagaaatggaatcagggatcacaacaccccccaaaatgaggagagtagcagaaactgattatgaaatggaaacccaaaggatttcctcatcacagcagcacccacatttacgcaaagtttcagtgtctgaatcaaatgttcttttagatgaagaagtacttactgatccgaagatccaagcacttcttcttactgttctggctacactggtgaaatacaccacagatgagtttgatcaacgaattctttatgaatacttagcagaagccagtgttgttttccccaaagtttttcctgttgtgcacaatttgttggactctaagatcaacaccctgttgtcattgtgccaagatccaaatttgttaaatccgatccatggaattgtgcaaagtgtggtgtaccatgaagaatccccaccacaataccaaacatcttacctgcaaagttttggttttaatggcttatggaggtttgcaggacccttttcaaagcaaacacaaatcccagactatgctgagctaattgttaagtttcttgatgccttgattgacacgtatttgcctggaattgatgaagaaaccagtgaggagtccctcctgacacccacatctccttatcctcctgcagtgcagagccagcttagtattactgctaaccttaacctttctaattccatgacctcacttgcaacttcccagcattccccaggaatcgacaaggagaatgttgaactctcccccaccactgggcactgtaacagtggacgaactcgccatggatccgcaagccaggtgcagaagcagagaagtgctggcagtttcaaacgtaatagcattaagaagatcgtgtgaagctttctttctttcctttttcaaacagacttaactgacacgggctcttcactagtgacccctcaccaccgtgctgtgatgctgcacttcatgtttctaatgagcccatccagtctaccatgttgccagatgatcaactcttggaagcgttgcctaaatttaatgctgcttttttctttaacttttttttttactttcggtgtgtctggtttaagcaagtgttcagaacagctgcaaagagagtgggcagtcaggacacttgacctgagaacatcccaattgtgagaggatgaattcttgaatactgctactactggccagctatgaaagccatttgcacagagctctgccttctatgttttccccttcttcaacatacaaagtaaagtgttagtcttatttacacacttttcgagatagaagtttatgggagaaataatattataaccccagtatgtttaatctgacttttagctgtggacttttttttaccttacaaaactgaagaaccatagaggtcaagcctcagtgacttcacaccataaagccaca

SEQ ID NO: 5 - DNA, 1868 bp, Homo sapiens
cgcacagggcgcacccggacgctctaccgctcccgccgcagtcgccgggccatgggcctcgagcccgccccgaacccccgcgagcccgccttgtctgcggcgtgactggaggcccagctgccgcccctccctgtgtccttccaagaagtgccacatgcactgatctcttgtgtccccagatggtcatcatgggccagtgctactacaacgagaccatcggcttcttctataacaacagtggcaaagagctcagctcccactggcggcccaaggatgtggtcgtggtggcactggggctgaccgtcagcgtgctggtgctgctgaccaatctgctggtcatagcagccatcgcctccaaccgccgcttccaccagcccatctactacctgctcggcaatctggccgcggctgacctcttcgcgggcgtggcctacctcttcctcatgttccacactggtccccgcacagcccgactttcacttgagggctggttcctgcggcagggcttgctggacacaagcctcactgcgtcggtggccacactgctggccatcgccgtggagcggcaccgcagtgtgatggccgtgcagctgcacagccgcctgccccgtggccgcgtggtcatgctcattgtgggcgtgtgggtggctgccctgggcctggggctgctgcctgcccactcctggcactgcctctgtgccctggaccgctgctcacgcatggcacccctgctcagccgctcctatttggccgtctgggctctgtcgagcctgcttgtcttcctgctcatggtggctgtgtacacccgcattttcttctacgtgcggcggcgagtgcagcgcatggcagagcatgtcagctgccacccccgctaccgagagaccacgctcagcctggtcaagactgttgtcatcatcctgggggcgttcgtggtctgctggacaccaggccaggtggtactgctcctggatggtttaggctgtgagtcctgcaatgtcctggctgtagaaaagtacttcctactgttggccgaggccaactcactggtcaatgctgctgtgtactcttgccgagatgctgagatgcgccgcaccttccgccgccttctctgctgcgcgtgcctccgccagtccacccgcgagtctgtccactatacatcctctgcccagggaggtgccagcactcgcatcatgcttcccgagaacggccacccactgatggactccaccctttagctaccttgaacttcagcggtacgcggcaagcaacaaatccacagcccctgatgacttgtgggtgctcctggctcaacccaaccaacaggactgactgactggcaggacaaggtctggcatggcacagcaccactgccaggcctccccaggcacaccactctgcccagggaatgggggctttgggtcatctcccactgcctgggggagtcagatggggtgcaggaatctggctcttcagccatctcaggtttagggggtttgtaacagacattattctgttttcactgcgtatccttggtaagccctgtggactggttcctgctgtgtgatgctgagggttttaaggtggggagagataagggctctctcgggccatgctacccggtatgactgggtaatgaggacagactgtggacaccccatctacctgagtctgattctttagcagcagagactgaggggtgcagagtgtgagctgggaaaggtttgtggctccttgcagcctccagggactggcctgtccccgatagaattgaagcagtccacggggaggggatgatacaaggagtaaacctttctttacactctaaaaaaaaaaaaaaaaaaaaaaaaaaaaaaaaaaaaaaaaaaaaa

SEQ ID NO: 6 - DNA, 346 bp, Homo sapiens
ttttatttcatttaatgtttaattcagatctagtacagtgatggggaggagggtggtttggggtggtgaggagtggtggtaaggggaccctctggcatcctcagcatgtagaataggagacttgggagagaaatggaaagttcaggctgggcgcggtggctcacgcctgtaatcccagcactttgggaggctgaggcgggcggatcgcgaggtcaacagattgagaccatcctggccaacatggtgaaaccccgtctgtacttaaatgcagtatctgattaatgttgtaagtgacattgcatatcagcctcagagtcttggttcaactgttggcaaagattgggca

SEQ ID NO: 7 - DNA, 1551 bp, Homo sapiens
gtgcctcccgtagccgcctcctcccagcagtcccccaggagcgagctgcgagatgccccaaatcggacccctccccagttggaaaaaaaacgactcctgacctttcccagcctcctcggtccgctgaggaacccgcagccccgggcctcgagcagactgctgggactgcggggcggccgggcgcggggccagaggcggggcggggcgggtcgggtcgggggcctttaagaggcgcggtcgccgggaccgacacagacgcggacagcgccgggactcgccgccccgggactcgcgcagcccgcagcgctccggctcctcctctcgcgaccgccctccgcagcgatggacggagacggtgacccagagagcgtgggccagcccgaggaggcaagcccggaggagcagccagaggaggcgagtgctgaggaggagcggccggaggaccagcaggaggaggaggcggcggccgccgccgcgtacctggacgagctgcccgagccgctgctgctgcgcgtgctggccgcactgccggccgccgagctggtgcaggcctgccgcctggtgtgcctgcgctggaaggagctggtggacggcgccccgctgtggctgctcaagtgccagcaggaggggctggtgcccgagggcggcgtggaggaggagcgcgaccactggcagcagttctacttcctgagcaagcggcgccgcaaccttctgcgtaacccgtgtggggaagaggacttggaaggctggtgtgacgtggagcatggtggggacggctggagggtggaggagctgcctggagacagtggggtggagttcacccacgatgagagcgtcaagaagtacttcgcctcctcctttgagtggtgtcgcaaagcacaggtcattgacctgcaggctgagggctactgggaggagctgctggacacgactcagccggccatcgtggtgaaggactggtactcgggccgcagcgacgctggttgcctctacgagctcaccgttaagctactgtccgagcacgagaacgtgctggctgagttcagcagcgggcaggtggcagtgccccaagacagtgacggcgggggctggatggagatctcccacaccttcaccgactatgggccgggcgtccgcttcgtccgcttcgagcacggggggcaggactccgtctactggaagggctggttcggggcccgggtgaccaacagcagcgtgtgggtagaaccctgagcgaccctgcctccactctcccccagctgcctggaggggcaaaggtcgagggtagataggccttaacttagtccatagcgtcctcaccttccccaagccacacatcctcctcccatcccttgctccgatcccagcccctgagcagggagagagaagttttgttggcataggtttgcttaggtagccggcttctagaatgtagatccgtgagggcgtgagcttggactggacccactgctgattccctgcacctagcacagtgcttgccacaaagtgggctctcaataaatattatttgtccaaaaaaaaaaaaaaaaa

SEQ ID NO: 8 - DNA, 443 bp, Homo sapiens
tgaaattcaggcgatttattgtaaacaggataaccctagcactccaccatactggctgtgtcacatgctccctctttcacatcaactggtcaaaaaagaagactttcttaagaagcctcaggtaactaataacttagttccacaaatctcatttactaagcactgcgtaaactgcagtatctggggtagtctgttattgctcatggactgcagcttggacccatctaaatgaatccattagtatgcctgagtgatcaacagcagctctagatccaacctggaaattggaaaatgctgacgcataccaaacaattgcaggttcatggaagactacatgagattgctctcagatctcttcatgtgtcattctcataaaaaaaacacttaaatttcacccattttttaaaaaagagctaaaagttactcaatagcacataattttc

SEQ ID NO: 9 - DNA, 421 bp, Homo sapiens
gcacaattaaaaatatttaatatttttatgttgaaagttcaaaatgaactttacaagagcagaaaaatgaagtattagaaattataaattcagaatttgccatttatgtcttctacaaaaagtggagaaatataattactggttaatgttcgtgatgacagcttaagaaataagcctactattttcagtgcatcctatttatactatatagtgtttgccatttgttcagagggtggctcttttcaatatattctagaagcaagataaactcttggacactggggtgaattgtctggtgaaatgtatccagtaggcagtggtttgtgccagtgtttggaagaagactggcttctgctcctgctttccatggacgctgatctgtccctcttagcctttcaggtctgtcctctctgccttcatt

SEQ ID NO: 10 - DNA, 375 bp, Homo sapiens
ttttttttttccaaaataagagaaacatatgaacatgtgtaagcagatacaaaggaagcaatgggaagggagagaataaaggcactgagggaggagaataggaacgtggacacagagaggaggtacacaaaggatgacagttttgtccaaaacatgaaaaaggcagacagtacaggcacagaagaatatacttggatgcatacaggattagatgcagtgtgcaatttcaattttggtattccactattcagttatacagtgttatatatcatggtaagtaatgagatactagtgttttggtacaaataccactatttcagtattttaataatgtctgaaacacaccttacttacatcttgagagcaggattaaca

SEQ ID NO: 11 - DNA, 392 bp, Homo sapiens
tttggctcttttaaacaaattttactctattaaaattggagacaaacatgtctgccatctctcactttggtagtagggagtaaggggtgccgtactcaaccagggttcctaatccacagtttgtggttctcaaattttgcactgatatgccgctagacactgcagcaagctcacagaactgccaaagaatatttaaaaaatttcaaagtggcaacagtggcatctgtcagataccaggtgttgagttgtttggacctaactatgtattaacagaactactagttatttcttttagtttaggggcactgcaaagcattactgagatcccaaaggcatcctgaatgggaaatgtttggcaggctctctggggctcagtgcaccatcaccatgtc

SEQ ID NO: 12 - DNA, 535 bp, Homo sapiens
ttttttagcgacttaaaacaaaacacatttattctcttacagttctagaggtcagaaattcaaaattagtttcactgggctaaaatcagtgtgttggcagggcacacttcctccagaggttctaagggaaaacagtttccttgccttttccagcttccaaagctacgttcgttgcatttttggccttctcttccacctccaaagccagcagtgtagcatcttgctgcagtagtcacattgcctccttctcctgtgtccaatctctctctctggcccccactcataaggacacttgggattgcatttagggggtccacccagataatctaggataatcccctcatctcaagatccttaatttaattacatgtgcaaagtccattatgtcatataatattcacaggttacaggggttataaaggggtatattttgggggccactatttagcttaccaccaaggaagcaagctccaaaagtttggaagaaacacagttcagatccctggtccacatgaaagaagtgtcagattaggag

SEQ ID NO: 13 - DNA, 385 bp, Homo sapiens
gacgactggaatttaatccaacttaagagcttccacacagcaaacggaaccatcatcagagtgaacagacaaccatggaatactatacagccataaaaaggaatgagatcatctcctctgcagggacatggatggagttggaagccatcaccctcagcaaactaatgcaggaacagaaaacaaaataccacatgttctcacttattagtgggagcttgatgatgagaacacatggacacctagagggaagcaacacacactggggcctcttggagcagggagctgggggagggagagcttcaagaggaataactaatggatgctgggcttaatacctaggtaatgctatgatctttgcagcaaaccacgatggcacatgtttact

SEQ ID NO: 14 - DNA, 240 bp, Homo sapiens
tcctcatggtaagatttattattctccgctctgtacaagccgcgtctgccatcccgccccccatgcgcccaccccaaaaagcacccagcactcccttgtgccctcccaactctgctcatactccactgtccagccagattccaaaggttggggaggggcggtttatacccatctccgccaaaacttactgggggcagagtgctgctggggcgggggatgatgcgggtcaaaaacgagggt

SEQ ID NO: 15 - DNA, 395 bp, Homo sapiens
tttttttttttttggcagtaattcaacaaacattttattaacctctactaaaccatatttattatttatggccaaatcacagaatcctgaagttagagactccaaggagaaaatgacactcctggctgagaatgacttctgtctcacagcgccagtgcatcctctcccatttcctccaattgataccagcgaagatgcacctaaagatggaaactcagtagtatcaatgcccaaaatacataatctggggggaaaacaccactagtacctcaaaaggcagactccaggtttgaattctggctctactacagaatagccggtgaccttaattttcttacctggaaaatagagataataagggatgatttcatagtcctgaggatttgaggaggtaa

SEQ ID NO: 16 - DNA, 581 bp, Homo sapiens
ttttttaatagagacacggtctatgttgcccatgctggtctcaaactcctgggctcaagcaatcctcctgcttcagtctcctaaagtgagccaccatgcctggccggaactcttgttgcaagaacaataagcatccactactgcagctgaaaacatccctgacagacccatctccctggtattcagggagggatggactaggcaatgattcagaagtcatactgaaaagctgcccttttcctactggtgcccctgcagtctgagcccaagcagacacatacttcagaggtgctacatttgtgctacaaagcacagatccttcttgacctggaggccagccttacccactgagaccaggttcctgtagttctccagcatcacttccctgtacagggacttctgtttgaggtccagcagtccccactcttccggggtaaaacccagtgttacatcttcaaaggtcactggttcctaaaaatccagattcttgttcagccacaggccatccgcatccacgacaaaagaaagacaggggaggctgaccaggccagtgaaagcacagaatggtctacaagatgacc

SEQ ID NO: 17 - DNA, 453 bp, Homo sapiens
tttttgcatgaactaatttgagcttcttattcattcaaatgttgtaacaattaacagaggtgtactatttggctttttatgctagtatttatgcttgttatccaaatcatgttcacatttaagaagtcattacacattttctgatgtattttatctaacaaaagacatttcttgcttttggaagcaaatgaagacaggtttttcataccccactgagtgacgtgttccactcagtacacagagataagatctccacagttggtagttgaacaggtgaccagaagcacggaaatgcagttcttcaaactgagaaacacagatttggaagaatgcttacaattcttttaatgagtctaagtaattcatctgccttgggaagggacacagacagccagattaagtaaccttttgcatgttcacaggtcaacttggagtatgctctttactataact

SEQ ID NO: 18 - DNA, 500 bp, Homo sapiens
gaatgattccatttaaaagaggtaccaagagtagtcaaattcacagagacagaaagtatggtgcttgtcatggctgaagggagagaaaatgggaattagtgtttattaggtacagagtttaagtctgggaagattaaaaaacttgtagagatggatagtgataatggttgcacaacaatgtgagtgtacttaatgtcactgaactgtacacttaaaaatggttaaaatggtacattttcttatgtatattttatcgcaattaaaaaaaatgttaccagtggttatctcagtgataagcccatggatgatggtattctttccacctctagactctaaatttcatgatgaacatagttgcttttataaatgacaaggtcaatttaaccttaaaacaaaaagaaaaacccttctaagtcactttaaagacactataaaagtgtcatgcacttgtatcccagctactctggagaataggcaggagacttgcttgagcccagaag

SEQ ID NO: 19 - DNA, 466 bp, Homo sapiens
ttttttttttttttttttgaggctttttcatggttcttggaaatttcttttgaataagcctaaacagtagtgtgaaagatatactgacttcctgccgaatacccagatactccattaatgattgcattatcaaatgtttccccttcaatccagctcaaagtgtttgtgagaaatacatggggaaagaatgagcagggtggagtggaaattggaccttccggagaagccccaggaagacattaccactggaattcccgtcccaggggaaaggcccctcccaacagacttgattctggttttggtctaccagtttcaaccccagcacagcttccagaagtctttgcgggaattcagagctgatttaggacgagtcacctatcgagaggacgggaagctttgctggggacgcttgtctgtccaagtaagaggaggccatgtggctgtgtgacagatgtgttttgtttct

SEQ ID NO: 20 - DNA, 1300 bp, Homo sapiens
atgtctaaagcagctcctgccaaaaagccagtggctgtggccccacctcctggatgtaccctggacatcaatgacccacaggtccagagtgcggccattcgcatccaggcctcttaccggggccacaggtcccggaaggagctgcgcgagaaggggccgccgcgggtgctggagccgctgaaggacgtggtgctgatcgagggcagcgcagccaagctcacttgccgcatttcggctttcccggacccattcatccgctggagtaaggacggcaaggagctacgtgacgggcccaagtaccgctacgtcttcgaggaccctgacgtggtggcactggtggtgcgcgacggcgagctggcagacctaggccagtacagcatcaacgtcaccaaccccttcggccagtgctccgactcggcgcgcatcctcgtggaagctggtgaggtgatgccctgcctcatctccgggtccttcacggggtttcgctcccctttccttccgctagtcccggcgaagattcaaaagggacccgacaacactaaggcgcgcaaaggcaccaccgtgacgctgactgcggagatcctgggagagcctgcgcccgacgtaggctggaccaaggacggggaggacatcgaggaggatgacagggtgttcttcgagatcggcagcaccaccacgacgctgaccattcgccgggccacgcctcaggacagcggcaagtacgaggtgtacgtggagaacagcctgggcatggaccagagcttcgctcgcgtggacgtggcctgaacggcacccccggaccttccgccctggcgccgagcccgggggtggtgggacccacagccctccaccagcttggttaataaagctgctctctgaccctccgcgtctgtcctgctcttccgcgtcgccattccctctcccccgcacccgcgcccacacgtattccagacccccacgccaaggtcacagcctgttggagtcacagggaggtctggagagcgcctagcgccgtgctgcatttcagacagtcaaactgataagagttgccctcgccgtccaaggcgccctcacttcccagcggtaccggcggctgggcctgggactccgccttctccgcttttgagcgcctccagccccagcccctcgtggctgtttgcccctggccccgccccttccagggctggccacacacccctgctgtccttagtcccgttttcctgtgggacccagttcctcacttcggctgctgccccgaggccgattccccaacagctcgggtcccagtcttatgttccag

SEQ ID NO: 21 - DNA, 405 bp, Homo sapiens
tttctgtagcctaggctggagtgctgtgacgtgatcacggtttactgcagcagcgaccttctgggctcaagcgatcttcctgcctcagcctcccgagtagctgagaccacaagtgctcactgctgctcccctaatttttaacttttttttttttttttttgtagcgatgcggtttcactatggtgtccaggctggtctgcaactcccgggctcaagcgatcctcccgccccgcctctcaaagtgctgggaaggtcccttccaggcttaagcagcgataatggttttcaagttaaaaacaaaggtaaccaaggaaaaagttttctctgaataccgagataaattagggaaatcgccagagacctgggtgctgaggaaacactactgaattataccacacagaccgg

SEQ ID NO: 22 - DNA, 372 bp, Homo sapiens
actcatatattttatttaacccaatatattgaaatattatcatttaacattaatattatgttactagtaaaatagtaatgagatattttacattttcttgtactaaatcttcaaaattcatcgtgtattttacactcaggtcatttcaatgtgtactggctacaatgtgagcactcaatagctgcagggtggtagtggttacaaagctaataagaagaggaactggaattgggacccccaagggggaactgggaccctgttccgacctccaagtcagttctgtccctgctgctatgcaagacctatttttgttccaacacaagtaaatgacttctctgaagatatccttaaagcttacccaggccagccccc

SEQ ID NO: 23 - DNA, 511 bp, Homo sapiens
tttcgctgggcccggcgtggtctccgggcgggtttaattgagtcccggggcgcaggaagcgccgcccgccgcccgcggggccggggttcaggggcgggaaagcggggccaaggcgggctttgaggcctgcccctcgggcgggagtgagggagttggtccgaagccgccgtgtgaagtcgggggaagcgggaaggagcccgcgccgagggccaggccgcgggggcggcccgggtaggcgcggggctggtgcgggctccgggccgtccgttttggggtccacctcgcttggtcctggcggcccactcggcctgcgcctcggctgcgctcacaggtgcgtgtcctcctcgaacacgtccgagtcctcggggtcccgcttgccccccatgagcgccccccagctccccgggccgttgagggccccgccgccgttaggctgggtgcttctcctgatctcgactggctgtcgtggccacgtcacgtggggtgcggtgcagctgtctcacgagcgcag

SEQ ID NO: 24 - DNA, 440 bp, Homo sapiens
ttttttttttttttctcaagccgtttttattacactgagcgtgtgacgacacgcgcaacaataaccttgtaattaatatactgaatcagtcggaaaagaaggggctgatggctgaaaagatgtacagatgactaaactatacaggctgggacggaattgacagtttgaaagagggtggattccttgttttacaagggctgaataggcttaacacgacctaaatgcagcgctctaactgggcgttaccatgaaaacgttacagaagggcggtcttaacacttagctacgatgaacagacttcgccaacacatgcctggctactcgctttcctaactttaaagaactgattcctctaaggaatactagtgcagcataccccttaaatagttgcatttatttttaaagatacaacctacggagaaactaacatcttgccaatc

SEQ ID NO: 25 - DNA, 903 bp, Homo sapiens
atggacaaggacagccctgaacagctggccctgagatatgaactggaacatggaccgggggccagggcccgaatccaggcactgctggactgcctggtcaaggtgctgctctgggtggcctctgccttgctgtactttggaagcgaacaggccgcccgccttctgggcagcccctgcttacggcgcctctaccatgcctggctggcagcagtggtcatctttgggccgcttctgcagttccatgtcaaccctcggactatcttcgccagccacggcaacttcttcaacataaaatttgtgaattcagcctggggctggacatgcaccttcttagggggctttgtgttgctggtggtgttcctggctacacggcgcgtggcagtaactgccagacacctgagccgactggtggtgggggcagccgtgtggcggggagccggccgggccttcctgctcatcgaggacctgactggctcctgcttcgagccactgccccagggtctgctgctccacgagctgcctgaccgccgcagctgcctggcggccggccaccagtggcgaggctacaccgtctcctcccacaccttcctgctcaccttttgctgcctgctcatggcagaggaagcagctgtgttcgccaagtacctggcccatgggcttcctgccggcgccccactgcgccttgtcttcctgctgaacgtgctgctgctgggcctctggaacttcttgctgctctgtaccgtcatctatttccaccagtacactcacaaggtggtaggcgccgcagtgggcaccttcgcctggtacctcacctatggcagctggtatcatcagccctggtctccagggagcccaggccatgggctcttcccccgtccccactccagccgcaagcataactga

SEQ ID NO: 26 - DNA, 499 bp, Homo sapiens
gaattggagccttctaattgccatcttaccttttctatcacattctcctggtctcaagaaagctggtggagtgggggttgtggggctcaagagccactagggcagtataaaaaaatccacaattgcctactaagtgtgtagcacagagccccgtgatgttttctcagaagaaatcaatgcccaacattcacatccaggttgactgggcatacactgatcctgactaagaccatttctgcccatatctgactgtcagccttctccaaaagaggcggtgcttccacaaaagccttgatgagataggtgtatcacttctcttctcccattgttgggccctcagatttacagtactgtacttgacttcttagtcttcaagaacctcaatagaacaactggaaatggaaaggtgggcaaggggtattcactctccctacctggctacatacagctaccccaaacacaagtggggctgtttgcttgatgccttggcagggaacag

SEQ ID NO: 27 - DNA, 473 bp, Homo sapiens
  misc_feature (441)..(441): n is a, c, g or t.
taaaagccagagaaatcggtaatttatttttctctgtggctatttctttctctctgccaactgccgagtgccaccccatccccgggtaaccagtattaccgtgctgctctctaaacaaaactcctttcaaaagacaatgttcaattagctgggccacagtttctgaacactaaattcaaagagtggcagccttttcccaatatataatgggaacgtcaaagtcagttttttaggactacttctaataactgtggactgggtaatttggaccaaattcccagttcaggacaacttaaaaagctgctcaaaatttgtgtgtgtgtgtggggcgggggaggacattttgaacagcttttaaagttatatatatatatatttaataaatatatgtacgtatatatatatatttaagtctaattgagagtattgggcaggaaacanagcagtgaagaatacaaggccaagatctggga

SEQ ID NO: 28 - DNA, 396 bp, Homo sapiens
tttttttttttttttttttttttttttttttttttttttttttttttttttttttttttttttttttttttttttttttttttttttttttttttttttttttttttttttttcccccccccccaagggggggcccttaaaaaaaaagcggccaaaaaaaaaaaaaaaaccccccccccccccccccccaaagggggggggccccaaacaaaaaaaagggggggttcccccccccccccccgggggggggcccccgggggggaaaaaaaaaggggggtttaaaaaaaaccccggtttcttttttttctttttcaaaaagggggggaaggggggggccccccccctaaaaaaaattttaaaaaaaggtaaaatgggggccccccccccccccttggg

SEQ ID NO: 29 - DNA, 2615 bp, Homo sapiens
tcgtgacgctcgtccgcaacctctgctgtcctccgcggcgcccccttccgcctgacgcgcccccggcggcggccgcgcagccctggctcctcgcgggctcgggcggcggctgcggcggggctatggcgagcggcggtggcgggggtaacactggcgcgggtggggggccggggatgggcctgagcctgggcctgggtctgggtctgagcctaggcatgagtgaggccaccagtgaggcagaggaggaggcggccacggccgaggcggtgggacgcctggccacgacgctgtggctgcggctccgcggctgggaggcggtgctggcggcggcgcagcggttgctggtgtgggagaagccgctgcacagcctggtcacggcggccgcgctcaacggcctcttctggttgctgtcttcctcgtccctccggcccttcttcctactcagcgtctcacttttggcctattttctgctggatctctggcagcctcgctttctccctgacgtttcagcatcatccccagaggagccacactctgacagtgagggtgcggggtcaggcgcccggccgcacctgctgagtgtgcccgagttgtgcagatacctggctgagagctggctcaccttccagattcacctgcaggagctgctgcagtacaagaggcagaatccagctcagttctgcgttcgagtctgctctggctgtgctgtgttggctgtgttgggacactatgttccagggattatgatttcctacattgtcttgttgagtatcctgctgtggcccctggtggtttatcatgagctgatccagaggatgtacactcgcctggagcccctgctcatgcagctggactacagcatgaaggcagaagccaatgccctgcatcacaaacacgacaagaggaagcgtcaggggaagaatgcacccccaggaggtgatgagccactggcagagacagagagtgaaagcgaggcagagctggctggcttctccccagtggtggatgtgaagaaaacagcattggccttggccattacagactcagagctgtcagatgaggaggcttctatcttggagagtggtggcttctccgtatcccgggccacaactccgcagctgactgatgtctccggggatttggaccagcagagcctgccaagtgaaccagaggagaccctaagccgggacctaggggagggagaggagggagagctggcccctcccgaagacctactaggccgtcctcaagctctgtcaaggcaagccctggactcggaggaagaggaagaggatgtggcagctaaggaaaccttgttgcggctctcatcccccctccactttgtgaacacgcacttcaatggggcagggtccccccaagatggagtgaaatgctcccctggaggaccagtggagacactgagccccgagacagtgagtggtggcctcactgctctgcccggcaccctgtcacctccactctgccttgttggaagtgacccagccccctccccttccattctcccacctgttccccaggactcaccccagcccctgcctgcccctgaggaagaagaggcactcaccactgaggactttgagttgctggatcagggggagctggagcagctgaatgcagagctgggcttggagccagagacaccgccaaaaccccctgatgctccacccctggggcccgacatccattctctggtacagtcagaccaagaagctcaggccgtggcagagccatgagccagccgttgaggaaggagctgcaggcacagtagggcttcttggctaggagtgttgctgtttcctcctttgcctaccactctggggtggggcagtgtgtggggaagctggctgtcggatggtagctattccaccctctgcctgcctgcctgcctgctgtcctgggcatggtgcagtacctgtgcctaggattggttttaaatttgtaaataattttccatttgggttagtggatgtgaacagggctagggaagtccttcccacagcctgcgcttgcctccctgcctcatctctattctcattccactatgccccaagccctggtggtctggccctttctttttcctcctatcctcagggacctgtgctgctctgccctcatgtcccacttggttgtttagttgaggcactttataatttttctcttgtcttgtgttcctttctgctttatttccctgctgtgtcctgtccttagcagctcaaccccatcctttgccagctcctcctatcccgtgggcactggccaagctttagggaggctcctggtctgggaagtaaagagtaaacctggggcagtgggtcaggccagtagttacactcttaggtcactgtagtctgtgtaaccttcactgcatccttgccccattcagcccggcctttcatgatgcaggagagcagggatcccgcagtacatggcgccagcactggagttggtgagcatgtgctctctcttgagattaggagcttccttactgctcctctgggtgatccaagtgtagtgggaccccctactagggttaggaagtggacactaacatctgtgcaggtgttgacttgaaaaataaagtgttgattggctag

SEQ ID NO: 30 - DNA, 480 bp, Homo sapiens
cctttttagagacgacaaagctcgttgaaggggagcattccccgtggggtgctgctggacacggggtgtctgctggaggagagcgcttgacacactggagatgttcagtccaactgcacagatgcaaaattgctcatgggggacaaaagtaacagaaaagccagcaagttgtgttttccttagggagctgtcaaaatagggaatcttgagggaatgagaattaactcatctccaatggccatgagcttcagacctattaaaatttatgtgtctttcgatgaactctgtatgttttaaaattgggggaggaaaacaagtgagactagacattgaggacaggggaaagttaggcacaagaggcaagaggtgaagagaggttccaggaagactgagaacagagagaagcttcgagaagctgtccaggacagttctaacccatctaggggaagacactatcttgtccactcttaataaaagacc

SEQ ID NO: 31 - DNA, 323 bp, Homo sapiens
  misc_feature (238)..(238): n is a, c, g or t.
taaaatttccaggaatttattggaaacacaatacaaattggttagtagatggcatctccttacagacagacaatccacactgtggtatcatgctcagaacgaattatcctgcggaaacactcatgagcacaggtgcgtgctctgggttagcttccctggcagggaaaatcagagacatagtgcagaggaacaggaggggtggacagaaaactgggacatggccttcctggggggaatnggtgagagggctgctaactgagtaaattcccccaaaggaaaacagggacaacagtaaagaataaaggcttccccctccctcccca

SEQ ID NO: 32 - DNA, 439 bp, Homo sapiens
tttttttttttacacgataaaaccacataatttatatcattataaataacatacaaaattttggaggctgaaataatatacatgagcagtcataaaatacaatgaaatcatgtgctttgcagccacatggatggagcttgaggtaattatcctaacctcggaaacagaaaatcaaatagcacatgttctcacttataagtgggagctaaataatgggtacctatggacataaagatggaaatagcaaacactgggcactccaaaagggggtgagtgggagggggggcaagggttgaaatgctacctgagtacaatgttcactatttgggtgataggtatgacagaagcccaatccccaccagtacgcaatatacacaaacacgcacatgtggctgggcgcagtggctcacgcctgtaatcccagcacttgggaggctga

SEQ ID NO: 33 - DNA, 485 bp, Homo sapiens
tttttttttttttttgccttttggcagtccttttattaaaacaaaagtaccatattgatatgtataaaaagaaactaggaatacagcaaaattaacaatggttgataagattacagatatttcactttccttatgcttttcagttttctatgttgaccttatgttacatttagaataaagtaaagaaaatgtatttaaaaaatcaaacctatatatcaagggcttgtttgttcatagaattatgggagcagaacttgtattacacagggttaacctatgagaggacggtgaggaactggatgctcagtgtataaacctaaaatgggtcttatagaattatagagtttaagtgtatttaacacagttttataaccgagatgtactgaacaatttctgggttcaccaaaccatggaatttcctcttcctgtccgaccaacaaaaatttttaaattcttggcagagattataagacattaagtgtgga

SEQ ID NO: 34 - DNA, 541 bp, Homo sapiens
cttgtctgtcctttacctcatggtgtggggtgtgcagatagcaggttgtggcttggtgagtgctcttcacttcaggtcaaggtgaggcacagttaacatgctaactactttcctcagttctctctgagttgtgtaaagctcccgatgccagacttcctcttaattttgcacattattaaagtccaaagagttaagatttggtgatgtggggcaaagggccagctgtcacagaaatcaatgaaatgatacacagaaatgggtatcatgaaaaggccactggacttgggaaaactgggtgcctgtccttgccctgccatgtacttacctgtgtgactggaggtgagatgttttacctatgggcctcagtttctcattacaaaatgacagagaagactagatacctaagttcctaagtttgtgacatttgtgaatttttcttggccctctgtgagtagagtgctaaatttagaggcttcctgtggttgaactgatgtccaattctcagggaacccagacttctcagttcagaacccagttccag

SEQ ID NO: 35 - DNA, 1550 bp, Homo sapiens
tgccgccgtcccgcccgccagcgccccagcgaggaagcagcgcgcagcccgcggcccagcgcacccgcagcagcgcccgcagctcgtccgcgccatgttccaggcggccgagcgcccccaggagtgggccatggagggcccccgcgacgggctgaagaaggagcggctactggacgaccgccacgacagcggcctggactccatgaaagacgaggagtacgagcagatggtcaaggagctgcaggagatccgcctcgagccgcaggaggtgccgcgcggctcggagccctggaagcagcagctcaccgaggacggggactcgttcctgcacttggccatcatccatgaagaaaaggcactgaccatggaagtgatccgccaggtgaagggagacctggctttcctcaacttccagaacaacctgcagcagactccactccacttggctgtgatcaccaaccagccagaaattgctgaggcacttctgggagctggctgtgatcctgagctccgagactttcgaggaaatacccccctacaccttgcctgtgagcagggctgcctggccagcgtgggagtcctgactcagtcctgcaccaccccgcacctccactccatcctgaaggctaccaactacaatggccacacgtgtctacacttagcctctatccatggctacctgggcatcgtggagcttttggtgtccttgggtgctgatgtcaatgctcaggagccctgtaatggccggactgcccttcacctcgcagtggacctgcaaaatcctgacctggtgtcactcctgttgaagtgtggggctgatgtcaacagagttacctaccagggctattctccctaccagctcacctggggccgcccaagcacccggatacagcagcagctgggccagctgacactagaaaaccttcagatgctgccagagagtgaggatgaggagagctatgacacagagtcagagttcacggagttcacagaggacgagctgccctatgatgactgtgtgtttggaggccagcgtctgacgttatgagtgcaaaggggctgaaagaacatggacttgtatatttgtacaaaaaaaaagttttatttttctaaaaaaagaaaaaagaagaaaaaatttaaagggtgtacttatatccacactgcacactgcctagcccaaaacgtcttattgtggtaggatcagccctcattttgttgcttttgtgaactttttgtaggggacgagaaagatcattgaaattctgagaaaacttcttttaaacctcacctttgtggggtttttggagaaggttatcaaaaatttcatggaaggaccacattttatatttattgtgcttcgagtgactgaccccagtggtatcctgtgacatgtaacagccaggagtgttaagcgttcagtgatgtggggtgaaaagttactacctgtcaaggtttgtgttaccctcctgtaaatggtgtacataatgtattgttggtaattattttggtacttttatgatgtatatttattaaagagatttttacaaatg

SEQ ID NO: 36 - DNA, 3110 bp, Homo sapiens
tggtgaactgcaactggctgttcctgaagtctgtgccccacttctccatggcagcaccccgtggcaatgtcaccagcctttccttgtcctccaaccgcatccaccacctccatgattctgactttgcccacctgcccagcctgcggcatctcaacctcaagtggaactgcccgccggttggcctcagccccatgcacttcccctgccacatgaccatcgagcccagcaccttcttggctgtgcccaccctggaagagctaaacctgagctacaacaacatcatgactgtgcctgcgctgcccaaatccctcatatccctgtccctcagccataccaacatcctgatgctagactctgccagcctcgccggcctgcatgccctgcgcttcctattcatggacggcaactgttattacaagaacccctgcaggcaggcactggaggtggccccgggtgccctccttggcctgggcaacctcacccacctgtcactcaagtacaacaacctcactgtggtgccccgcaacctgccttccagcctggagtatctgctgttgtcctacaaccgcatcgtcaaactggcgcctgaggacctggccaatctgaccgccctgcgtgtgctcgatgtgggcggaaattgccgccgctgcgaccacgctcccaacccctgcatggagtgccctcgtcacttcccccagctacatcccgataccttcagccacctgagccgtcttgaaggcctggtgttgaaggacagttctctctcctggctgaatgccagttggttccgtgggctgggaaacctccgagtgctggacctgagtgagaacttcctctacaaatgcatcactaaaaccaaggccttccagggcctaacacagctgcgcaagcttaacctgtccttcaattaccaaaagagggtgtcctttgcccacctgtctctggccccttccttcgggagcctggtcgccctgaaggagctggacatgcacggcatcttcttccgctcactcgatgagaccacgctccggccactggcccgcctgcccatgctccagactctgcgtctgcagatgaacttcatcaaccaggcccagctcggcatcttcagggccttccctggcctgcgctacgtggacctgtcggacaaccgcatcagcggagcttcggagctgacagccaccatgggggaggcagatggaggggagaaggtctggctgcagcctggggaccttgctccggccccagtggacactcccagctctgaagacttcaggcccaactgcagcaccctcaacttcaccttggatctgtcacggaacaacctggtgaccgtgcagccggagatgtttgcccagctctcgcacctgcagtgcctgcgcctgagccacaactgcatctcgcaggcagtcaatggctcccagttcctgccgctgaccggtctgcaggtgctagacctgtcccacaataagctggacctctaccacgagcactcattcacggagctaccacgactggaggccctggacctcagctacaacagccagccctttggcatgcagggcgtgggccacaacttcagcttcgtggctcacctgcgcaccctgcgccacctcagcctggcccacaacaacatccacagccaagtgtcccagcagctctgcagtacgtcgctgcgggccctggacttcagcggcaatgcactgggccatatgtgggccgagggagacctctatctgcacttcttccaaggcctgagcggtttgatctggctggacttgtcccagaaccgcctgcacaccctcctgccccaaaccctgcgcaacctccccaagagcctacaggtgctgcgtctccgtgacaattacctggccttctttaagtggtggagcctccacttcctgcccaaactggaagtcctcgacctggcaggaaaccagctgaaggccctgaccaatggcagcctgcctgctggcacccggctccggaggctggatgtcagctgcaacagcatcagcttcgtggcccccggcttcttttccaaggccaaggagctgcgagagctcaaccttagcgccaacgccctcaagacagtggaccactcctggtttgggcccctggcgagtgccctgcaaatactagatgtaagcgccaaccctctgcactgcgcctgtggggcggcctttatggacttcctgctggaggtgcaggctgccgtgcccggtctgcccagccgggtgaagtgtggcagtccgggccagctccagggcctcagcatctttgcacaggacctgcgcctctgcctggatgaggccctctcctgggactgtttcgccctctcgctgctggctgtggctctgggcctgggtgtgcccatgctgcatcacctctgtggctgggacctctggtactgcttccacctgtgcctggcctggcttccctggcgggggcggcaaagtgggcgagatgaggatgccctgccctacgatgccttcgtggtcttcgacaaaacgcagagcgcagtggcagactgggtgtacaacgagcttcgggggcagctggaggagtgccgtgggcgctgggcactccgcctgtgcctggaggaacgcgactggctgcctggcaaaaccctctttgagaacctgtgggcctcggtctatggcagccgcaagacgctgtttgtgctggcccacacggaccgggtcagtggtctcttgcgcgccagcttcctgctggcccagcagcgcctgctggaggaccgcaaggacgtcgtggtgctggtgatcctgagccctgacggccgccgctcccgctatgtgcggctgcgccagcgcctctgccgccagagtgtcctcctctggccccaccagcccagtggtcagcgcagcttctgggcccagctgggcatggccctgaccagggacaaccaccacttctataaccggaacttctgccagggacccacggccgaatagccgtgagccggaatcctgcacggtgccacctccacactcacctcacctctgcctgcctggtctgaccctcccctgctcgcctccctcaccccacacctgacacagagcaggcactcaataaatgctaccgaaggc

SEQ ID NO: 37 - DNA, 3912 bp, Homo sapiens
gccatgccgggccgggcggaggcgggggaggccgaggaggaggccggggccggctcggggtctgaggcggaggaggacgcgctgtgggagcgaatcgagggcgtccggcatcggctggctcgcgccctgaacccggccaagctcacgccgtatctgcgccagtgccgggtcatcgacgagcaggacgaggaggaggtgctgagcacctaccgcttcccgtgccgcgtcaaccgcaccgggcgcctgatggacatcttgcgctgccgtggcaagaggggctatgaggccttcctggaagccctggagttctactaccccgaacacttcacgctgctcacgggccaggaacccgcccagcgctgctccatgatcctcgatgaggaggggcctgagggcctgacccaattcttgatgacagaggtgcgacggctgcgggaagctcgcaagagccagctgcagcgggagcagcaactgcaggcccggggccgggtgctcgaggaggagcgggcagggctggagcagcggctgcgggaccagcagcaggctcaggagcgctgtcaacggctgcgggaggactgggaggcgggcagcctggagctgctgcggctcaaggatgagaactacatgatcgccatgcgcctggcacagctcagtgaggagaagaactcggctgtacttcgcagccgtgacctgcagctggcggtggatcagctcaagctcaaagtgagtcggctggaggaagagtgtgcactgcttcgaagggccaggggcccgccccctggggcagaggagaaggagaaggagaaggagaaggagaaggagccagacaatgtggaccttgtctctgagctgcgtgctgagaaccagcggctgacggcgtcactgcgggagttgcaggagggcctgcagcaggaggcgagccggccgggggccccgggctccgagcgcatcctgctggacatcctagagcatgactggcgggaggcgcaggacagcaggcaggagctgtgccagaagctgcatgccgtgcagggggagctgcagtgggccgaggagctgcgcgaccagtacctgcaggagatggaagacctgcggctcaagcaccgcacgctgcagaaggactgtgacctgtacaagcaccgcatggccactgtcctggcccaactggaggagattgagaaggagcgagaccaggccatccagagccgtgaccggatccagttgcagtactcacagagcctcatcgagaaggaccagtaccgcaagcaggtgcggggcctggaggcggagcgggatgagctgctgacaacgctcaccagcctggagggcaccaaggctctgctggaggttcagctgcagcgggcccagggtggcacctgcctcaaggcctgtgcctcctcccattccctgtgctccaacctcagcagcacttggagcctgagcgagttcccctcccctctgggaggcccagaagcaactggggaggcagctgtcatggggggacctgagcctcacaactcggaggaagccacagacagtgaaaaggagatcaatcggctctccatcctgcccttcccccccagtgccggctccatcctccgccggcagcgtgaggaagaccccgcaccccctaagagatccttcagcagcatgtcagacatcacagggagtgtgacacttaagccctggtcccctggcctctcttcgtcctcatcctctgacagcgtgtggcctttgggaaagccggaaggcctcctggctcggggctgtggcctggacttcctcaacaggtctctggctattcgggtgtctggccggagccccccagggggcccagagccgcaggacaagggaccagatggactgtcgttttatggggacagatggtctggggctgtggtgcgcagggtgctgtctgggcctgggtccgccaggatggaaccaagagagcaaagggtggaagctgctggtctggagggggcgtgcctggaagccgaggcccagcagagaaccttgctctggaatcaggggtccacactcccctccctgatggactcgaaggcctgccagtccttccacgaggccctagaagcctgggcaaagggaccaggtgccgagcccttctacattcgtgccaacctcaccttgcctgagagggcagatccccatgccctttgcgtgaaagcccaagagatccttcgactggtggactcggcatacaagcggaggcaggaatggttctgcacccgggttgaccccctcactctgcgggacctggaccggggcaccgtgcccaattatcagagagcccagcagctcctagaagttcaggagaaatgcctgccctccagccggcaccgaggcccccgcagtaatctgaagaagagagccctggaccagctgcggctggtgaggcccaagcccgtgggggcgcctgcaggggactccccggatcagctgctgctggagccctgtgcagagccggagcggagcctcagaccctacagtttggtgcggccgctactggtgtctgccctgcggcccgtggtgctgttgcctgagtgcctggcgccccggctcatccgtaacctgctagacctgcccagctcccggctggacttccaagtgtgcccagcggaaagcctctctggggaggaactgtgcccatcctcagcgcctggagcccccaaggctcagcctgccacccctgggctaggcagcaggatccgggccatccaggagtctgttgggaagaagcactgcctgctggagctgggtgctcggggtgtgcgggagctggtgcagaacgagatctaccccatcgtcatccacgtggaggtgactgagaagaatgtccgggaagtcaggggtctgctgggccggccgggctggcgggactcagagctgctgcggcagtgccgtggctcagagcaggtgctctgggggctgccctgctcctgggtgcaggtgcccgcccatgagtggggacacgcagaggagctggccaaggtggtgcgcggccgcatcctgcaggagcaggcccgcctcgtgtgggtggagtgcggcagcagcagaggctgccccagcagcagtgaggcctgaggctcatctgatacctgcaccttctccccaagccagcgtggaccctggtgtctatggtgaagctgggccctcccaccctgagccttcctagacccttggactctcagatgcagggcccttggctctggcctctcacccccaaggctgtctctggccctgccgagcctatgggagtcccgggacagagtgcccactcccctctacttgctgctctgggcctccccacctttcctggggtctccacattcccactagtgggtcttatgtgtgtctgtgtcttctccttaaacactcgccctggagtctgttctcacacctgtgcgcaggtttgcacactcaagttctcatgggcaggctcaggtctgtcccgctgccctgggcacgaggtctcctgaggacctgggcctgttctgctcctaggagacctgagcccgttaccgcgtgactcccaccatccagctcgcgctcctcgtggattcagccatgcatggactggggtgttccctggcccatggtcacctgtgcccctcgtgtctcctcacatgggtgtctgtggttctctcctgtgtaaatgtcacgccccacccctgtttcatgtgggcactaacacgtgtgcgttcctggcgggcacactcaggaccgtgcctcacagggcccactccctgcctatgcctccctcttggggggccgaggagggcggctgctctgtcatgagaatgtacggcccgtggatgattaacgggcctttttcacttagaagctgcacattatggagcattaaacacttttgtcatagaaaaaaaaaaaaaa

SEQ ID NO: 38 - DNA, 1344 bp, Homo sapiens
tgcagactgatatggattcaccactgctaacacctcctggttggaactacaggaatagaactggaaagggaaaaaaggcagcattcaccacatcccaatcctgaatccaagagtctaagatagtcccccactcctatctcaggcttagaggattagattaatctcctggagggaagactcttccttgaaacatttttttttatctgcctgtagctattgggataattcgggaaatccacagggacagttcaagtcatctttgtcctctactttctgttgcactctcagccttgttctctttttagaaactgcatggtaactattatatagctaaagaagagcattctgacctctgccctgggacttcctggatcctcctcttcttataaatacaagggcagagctggtatcccggggagccaggaagcagtgagcccaggagtcctcggccagccctgcctgcccaccaggaggatgaaggtctccgtggctgccctctcctgcctcatgcttgttgctgtccttggatcccaggcccagttcataaatgatgcagagacagagttaatgatgtcaaagcttccactggaaaatccagtagttctgaacagctttcactttgctgctgactgctgcacctcctacatctcacaaagcatcccgtgttcactcatgaaaagttattttgaaacgagcagcgagtgctccaagccaggtgtcatattcctcaccaagaaggggcggcaagtctgtgccaaacccagtggtccgggagttcaggattgcatgaaaaagctgaagccctactcaatataataataaagagacaaaagaggccagccacccacctccaacacctcctgagcctctgaagctcccaccaggccagctctcctcccacaacagcttcccacagcatgaagatctccgtggctgccattcccttcttcctcctcatcaccatcgccctagggaccaagactgaatcctcctcacggggaccttaccacccctcagagtgctgcttcacctacactacctacaagatcccgcgtcagcggattatggattactatgagaccaacagccagtgctccaagcccggaattgtcttcatcaccaaaaggggccattccgtctgtaccaaccccagtgacaagtgggtccaggactatatcaaggacatgaaggagaactgagtgacccagaaggggtggcgaaggcacagctcagagacataaagagaagatgccaaggccccctcctccacccaccgctaactctcagccccagtcaccctcttggagcttccctgctttgaattaaagaccactcatgctcttc

SEQ ID NO: 39 - DNA, 562 bp, Homo sapiens
ctggaattgaggctgagccaaagaccccagggccgtctcagtctcataaaaggggatcaggcaggaggagtttgggagaaacctgagaagggcctgatttgcagcatcatgatgggcctctccttggcctctgctgtgctcctggcctccctcctgagtctccaccttggaactgccacacgtgggagtgacatatccaagacctgctgcttccaatacagccacaagccccttccctggacctgggtgcgaagctatgaattcaccagtaacagctgctcccagcgggctgtgatattcactaccaaaagaggcaagaaagtctgtacccatccaaggaaaaaatgggtgcaaaaatacatttctttactgaaaactccgaaacaattgtgactcagctgaattttcatccgaggacgcttggaccccgctcttggctctgcagccctctggggagcctgcggaatcttttctgaaggctacatggacccgctggggaggagagggtgtttcctcccagagttactttaataaaggttgttcatagagttgacttgttcat

SEQ ID NO: 40 - DNA, 469 bp, Homo sapiens
cccagataaaaggtaggggaggaggagagagagagaaggaagagtctaggctgagcaacatgaaggggcccccaaccttctgcagcctcctgctgctgtcattgctcctgagcccagaccctacagcagcattcctactgccacccagcactgcctgctgtactcagctctaccgaaagccactctcagacaagctactgaggaaggtcatccaggtggaactgcaggaggctgacggggactgtcacctccaggctttcgtgcttcacctggctcaacgcagcatctgcatccacccccagaaccccagcctgtcacagtggtttgagcaccaagagagaaagctccatgggactctgcccaagctgaattttgggatgctaaggaaaatgggctgaagcccccaatagccaaataataaagcagcattggataataatttctgaaaaaaaaaaaaaaaaaaaaaaaa

SEQ ID NO: 41 - DNA, 8629 bp, Homo sapiens
ttttgtcccggaaccccgcagccctccccacactctgggcgcggagcacaatgattggtcactcctattttcgctgagcttttcctcttatttcagttttcttcgagatcaaatctggtttgtagatgtgcttggggagaatgggggcctcttctccaagaagcccggagcctgtcgggccgccggcgcccggtctccccttctgctgcggaggatccctgctggcggttgtggtgctgcttgcgctgccggtggcctggggtcaatgcaatgccccagaatggcttccatttgccaggcctaccaacctaactgatgaatttgagtttcccattgggacatatctgaactatgaatgccgccctggttattccggaagaccgttttctatcatctgcctaaaaaactcagtctggactggtgctaaggacaggtgcagacgtaaatcatgtcgtaatcctccagatcctgtgaatggcatggtgcatgtgatcaaaggcatccagttcggatcccaaattaaatattcttgtactaaaggataccgactcattggttcctcgtctgccacatgcatcatctcaggtgatactgtcatttgggataatgaaacacctatttgtgacagaattccttgtgggctaccccccaccatcaccaatggagatttcattagcaccaacagagagaattttcactatggatcagtggtgacctaccgctgcaatcctggaagcggagggagaaaggtgtttgagcttgtgggtgagccctccatatactgcaccagcaatgacgatcaagtgggcatctggagcggccccgcccctcagtgcattatacctaacaaatgcacgcctccaaatgtggaaaatggaatattggtatctgacaacagaagcttattttccttaaatgaagttgtggagtttaggtgtcagcctggctttgtcatgaaaggaccccgccgtgtgaagtgccaggccctgaacaaatgggagccggagctaccaagctgctccagggtatgtcagccacctccagatgtcctgcatgctgagcgtacccaaagggacaaggacaacttttcacctgggcaggaagtgttctacagctgtgagcccggctacgacctcagaggggctgcgtctatgcgctgcacaccccagggagactggagccctgcagcccccacatgtgaagtgaaatcctgtgatgacttcatgggccaacttcttaatggccgtgtgctatttccagtaaatctccagcttggagcaaaagtggattttgtttgtgatgaaggatttcaattaaaaggcagctctgctagttactgtgtcttggctggaatggaaagcctttggaatagcagtgttccagtgtgtgaacaaatcttttgtccaagtcctccagttattcctaatgggagacacacaggaaaacctctggaagtctttccctttgggaaaacagtaaattacacatgcgacccccacccagacagagggacgagcttcgacctcattggagagagcaccatccgctgcacaagtgaccctcaagggaatggggtttggagcagccctgcccctcgctgtggaattctgggtcactgtcaagccccagatcattttctgtttgccaagttgaaaacccaaaccaatgcatctgactttcccattgggacatctttaaagtacgaatgccgtcctgagtactacgggaggccattctctatcacatgtctagataacctggtctggtcaagtcccaaagatgtctgtaaacgtaaatcatgtaaaactcctccagatccagtgaatggcatggtgcatgtgatcacagacatccaggttggatccagaatcaactattcttgtactacagggcaccgactcattggtcactcatctgctgaatgtatcctctcgggcaatgctgcccattggagcacgaagccgccaatttgtcaacgaattccttgtgggctaccccccaccatcgccaatggagatttcattagcaccaacagagagaattttcactatggatcagtggtgacctaccgctgcaatcctggaagcggagggagaaaggtgtttgagcttgtgggtgagccctccatatactgcaccagcaatgacgatcaagtgggcatctggagcggcccggcccctcagtgcattatacctaacaaatgcacgcctccaaatgtggaaaatggaatattggtatctgacaacagaagcttattttccttaaatgaagttgtggagtttaggtgtcagcctggctttgtcatgaaaggaccccgccgtgtgaagtgccaggccctgaacaaatgggagccggagctaccaagctgctccagggtatgtcagccacctccagatgtcctgcatgctgagcgtacccaaagggacaaggacaacttttcacccgggcaggaagtgttctacagctgtgagcccggctatgacctcagaggggctgcgtctatgcgctgcacaccccagggagactggagccctgcagcccccacatgtgaagtgaaatcctgtgatgacttcatgggccaacttcttaatggccgtgtgctatttccagtaaatctccagcttggagcaaaagtggattttgtttgtgatgaaggatttcaattaaaaggcagctctgctagttattgtgtcttggctggaatggaaagcctttggaatagcagtgttccagtgtgtgaacaaatcttttgtccaagtcctccagttattcctaatgggagacacacaggaaaacctctggaagtctttccctttggaaaagcagtaaattacacatgcgacccccacccagacagagggacgagcttcgacctcattggagagagcaccatccgctgcacaagtgaccctcaagggaatggggtttggagcagccctgcccctcgctgtggaattctgggtcactgtcaagccccagatcattttctgtttgccaagttgaaaacccaaaccaatgcatctgactttcccattgggacatctttaaagtacgaatgccgtcctgagtactacgggaggccattctctatcacatgtctagataacctggtctggtcaagtcccaaagatgtctgtaaacgtaaatcatgtaaaactcctccagatccagtgaatggcatggtgcatgtgatcacagacatccaggttggatccagaatcaactattcttgtactacagggcaccgactcattggtcactcatctgctgaatgtatcctctcaggcaatactgcccattggagcacgaagccgccaatttgtcaacgaattccttgtgggctacccccaaccatcgccaatggagatttcattagcaccaacagagagaattttcactatggatcagtggtgacctaccgctgcaatcttggaagcagagggagaaaggtgtttgagcttgtgggtgagccctccatatactgcaccagcaatgacgatcaagtgggcatctggagcggccccgcccctcagtgcattatacctaacaaatgcacgcctccaaatgtggaaaatggaatattggtatctgacaacagaagcttattttccttaaatgaagttgtggagtttaggtgtcagcctggctttgtcatgaaaggaccccgccgtgtgaagtgccaggccctgaacaaatgggagccagagttaccaagctgctccagggtgtgtcagccgcctccagaaatcctgcatggtgagcataccccaagccatcaggacaacttttcacctgggcaggaagtgttctacagctgtgagcctggctatgacctcagaggggctgcgtctctgcactgcacaccccagggagactggagccctgaagccccgagatgtgcagtgaaatcctgtgatgacttcttgggtcaactccctcatggccgtgtgctatttccacttaatctccagcttggggcaaaggtgtcctttgtctgtgatgaagggtttcgcttaaagggcagttccgttagtcattgtgtcttggttggaatgagaagcctttggaataacagtgttcctgtgtgtgaacatatcttttgtccaaatcctccagctatccttaatgggagacacacaggaactccctctggagatattccctatggaaaagaaatatcttacacatgtgacccccacccagacagagggatgaccttcaacctcattggggagagcaccatccgctgcacaagtgaccctcatgggaatggggtttggagcagccctgcccctcgctgtgaactttctgttcgtgctggtcactgtaaaaccccagagcagtttccatttgccagtcctacgatcccaattaatgactttgagtttccagtcgggacatctttgaattatgaatgccgtcctgggtattttgggaaaatgttctctatctcctgcctagaaaacttggtctggtcaagtgttgaagacaactgtagacgaaaatcatgtggacctccaccagaacccttcaatggaatggtgcatataaacacagatacacagtttggatcaacagttaattattcttgtaatgaagggtttcgactcattggttccccatctactacttgtctcgtctcaggcaataatgtcacatgggataagaaggcacctatttgtgagatcatatcttgtgagccacctccaaccatatccaatggagacttctacagcaacaatagaacatcttttcacaatggaacggtggtaacttaccagtgccacactggaccagatggagaacagctgtttgagcttgtgggagaacggtcaatatattgcaccagcaaagatgatcaagttggtgtttggagcagccctccccctcggtgtatttctactaataaatgcacagctccagaagttgaaaatgcaattagagtaccaggaaacaggagtttctttaccctcactgagatcatcagatttagatgtcagcccgggtttgtcatggtagggtcccacactgtgcagtgccagaccaatggcagatgggggcccaagctgccacactgctccagggtgtgtcagccgcctccagaaatcctgcatggtgagcataccctaagccatcaggacaacttttcacctgggcaggaagtgttctacagctgtgagcccagctatgacctcagaggggctgcgtctctgcactgcacgccccagggagactggagccctgaagcccctagatgtacagtgaaatcctgtgatgacttcctgggccaactccctcatggccgtgtgctacttccacttaatctccagcttggggcaaaggtgtcctttgtttgcgatgaagggttccgattaaaaggcaggtctgctagtcattgtgtcttggctggaatgaaagccctttggaatagcagtgttccagtgtgtgaacaaatcttttgtccaaatcctccagctatccttaatgggagacacacaggaactccctttggagatattccctatggaaaagaaatatcttacgcatgcgacacccacccagacagagggatgaccttcaacctcattggggagagctccatccgctgcacaagtgaccctcaagggaatggggtttggagcagccctgcccctcgctgtgaactttctgttcctgctgcctgcccacatccacccaagatccaaaacgggcattacattggaggacacgtatctctatatcttcctgggatgacaatcagctacatttgtgaccccggctacctgttagtgggaaagggcttcattttctgtacagaccagggaatctggagccaattggatcattattgcaaagaagtaaattgtagcttcccactgtttatgaatggaatctcgaaggagttagaaatgaaaaaagtatatcactatggagattatgtgactttgaagtgtgaagatgggtatactctggaaggcagtccctggagccagtgccaggcggatgacagatgggaccctcctctggccaaatgtacctctcgtacacatgatgctctcatagttggcactttatctggtacgatcttctttattttactcatcattttcctctcttggataattctaaagcacagaaaaggcaataatgcacatgaaaaccctaaagaagtggctatccatttacattctcaaggaggcagcagcgttcatccccgaactctgcaaacaaatgaagaaaatagcagggtccttccttgacaaagtactatacagctgaagaacatctcgaatacaattttggtgggaaaggagccaattgatttcaacagaatcagatctgagcttcataaagtctttgaagtgacttcacagagacgcagacatgtgcacttgaagatgctgccccttccctggtacctagcaaagctcctgcctctttgtgtgcgtcactgtgaaacccccacccttctgcctcgtgctaaacgcacacagtatctagtcaggggaaaagactgcatttaggagatagaaaatagtttggattacttaaaggaataaggtgttgcctggaatttctggtttgtaaggtggtcactgttcttttttaaaatatttgtaatatggaatgggctcagtaagaagagcttggaaaatgcagaaagttatgaaaaataagtcacttataattatgctacctactgataaccactcctaatattttgattcattttctgcctatcttctttcacatatgtgtttttttacatacgtacttttcccccttagtttgtttccttttattttatagagcagaaccctagtcttttaaacagtttagagtgaaatatatgctatatcagtttttactttctctagggagaaaaattaatttactagaaaggcatgaaatgatcatgggaagagtggttaagactactgaagagaaatatttggaaaataagatttcgatatcttctttttttttgagatggagtctggctctgtctcccaggctggagtgcagtggcgtaatctcggctcactgcaagctccgcctcccgggttgacaccattttcctgcctcagcctcctgagtagttgggattaccagtagatgggactacaggcacctgccaacacgcccggctaatttttttgtatttttagtagagacggggtttcaccatgttagccaggatggtctggatctcctgacctcgtgatccacctgcctcggcctcccaaagtgctgcgattacaggcatgagccaccgcgcctggccgctttcgatattttctaaactttaattcaaaagcactttgtgctgtgttctatataaaaaacataataaaaattgaaatgaaagaataattgttattataaaagtactagcttacttttgtatggattcagaatatactaaattaactttttaaaacacaacttttaaaaaatgtatcaaaataataaacgtgttctgatatttttaaaataagtgaccttgtgttctttaaccagtccacatctttagagaacaaaaatgtgttatgatattatgggccatgctaatgacctctagaaaacatcagaatatttctggatatttaataatagctttatatatgactaatgctcatttctatgtaattctgtttaatagttgctttaaaggtgaattttgccacatttactttgacagcagtataaggagtgagatagacatgaacctgaatttcaatttaaaatcatggaagagagggaaaaaaaaccagcttaagaaaaatcaactgataaactgcaagaaaaaaatgcaacttacatcacaaaagctaattgctttattatttagagagtacttaaaaattaaagaccaaacttctctccacccaacaaaaatgggcaaaggacatacagctaggtcaccaagaaagaagggcaaataggtggtgagtatatgtaaagatacttgataggacttttgcttagttgaatctttagcaaatctcttttatttcttgggattttgaagaagtaatttttaaaggaggactagaaactaagtgattgggaattggcctttttagaattaaaatttcccattacaagaaaaaaaaatcctgtgttcttttttttttccagaatggagtaggtcagtgagcaatgtgattaataaatatttcaatgtctgtgacttttgatttattttggagacagggtcttgctctgttacccaggctggagtgcagtggtgctatctaggcttactgcaacctcacctgtcactttttaattgcaagaaagctgaaaggtttttttctattatatcagttataatgataaatactgtatatactaactatgagtaaaatactatattgcctaacttgtattattaagcaattctgctaacctgtgaccttacattttcatctgaaaagcaggggctggacaccaattgccctatgaagctattgctagtcctaacattctttgttttgtttgcttttttggcacacttaagtgtgtactatgaagtttatgatgctttaatgaaattttctgtctctaccattgtaatgagaaaggaataaaatactttattttgcaaatctaaaaaaaaaaaaaa

SEQ ID NO: 42 - DNA, 3129 bp, Homo sapiens
cccccacccccccaggggacaggcggagccggccttctccccgtctctagtagtttccgcaccgctgacgcatgcctgcgcgcacagctgggccgggcgcgtcctacgcagcagccgcgagccgggctgcgggtgccagacggttcccggcggggggcaggggcggggcgccgcaggaggccgggactcctggcggaggagccccaaggaggcccgcctgacgactgaccagttgccatggcatcctactacgagatcctagacgtgccgcgaagtgcgtccgctgatgacatcaagaaggcgtatcggcgcaaggctctccagtggcacccagacaaaaacccagataataaagagtttgctgagaagaaatttaaggaggtggccgaggcatatgaagtgctgtctgacaagcacaagcgggagatttacgaccgctatggccgggaagggctgacagggacaggaactggcccatctcgggcagaagctggcagtggtgggcctggcttcaccttcaccttccgcagccccgaggaggtcttccgggaattctttgggagtggagacccttttgcagagctctttgatgacctgggccccttctcagagcttcagaaccggggttcccgacactcaggccccttctttaccttctcttcctccttccctgggcactccgatttctcctcctcatctttctccttcagtcctggggctggtgcttttcgctctgtttctacatctaccacctttgtccaaggacgccgcatcaccacacgcagaatcatggagaacgggcaggagcgggtggaagtggaggaggatgggcagctgaagtcagtcacaatcaatggtgtcccagatgacctggcactgggcttggagctgagccgtcgcgagcagcagccgtcagtcacttccaggtctgggggcactcaggtccagcagacccctgcctcatgccccttggacagcgacctctctgaggatgaggacctgcagctggccatggcctacagcctgtcagagatggaggcagctgggaagaaacccgcaggtgggcgggaggcacagcaccgacggcaggggcggcccaaggcccagcaccaagatccaggcttgggggggacccaggagggtgcgaggggtgaagcaaccaaacgcagtccatccccagaggagaaggcctctcgctgcctcatcctctgaacaccgggcccaacctgatctgatccagatcttgactggggggtctgactcactgtgggaagagaagaggggagtatcctgagttgtaggaactgctttccaactccaagctccctccacaagtttccctcccaggccccccacaccccagtgtggacttgggatttgctgtgctcagcccagggctgataggtccctggtgaagcccagggtggggggtgtcagggcagtggaggggcccgaggagccaggttgcatttattggatggggagctccaaggggcattagtggtttgggctgggccttttgtgccctggtactctgccacctgtgttgctgatggtgtcaaggaaggaggacttggcctagggttgtctgagccggagccggcagctccactggagagcagtgcaggcagagtggagcctcctgctctcctggaccagctgcagacccccaaccctggtttctgtgccatgttgcgctctgaccgtctctgttgcttctcttctggtgttgcttctcctccctcccattctctctgcaactccctgcgggccgcatcgcttgctttcactgccgtctggctaggactcccttcttccttccttccccgagaaggcctcaatgtggcgaggaagatgctggggccggtagggctgtgagatcttctggggaggctagccgggtggggcgggagcctctcagctgtccagattcagaactggagcccactcctcctccctctcgttgcctcagcctgccctcaccctcaggactaggcagaggtgaggctggctcaccctgaagaggtgggataggaccgggggaccccagagggaggcctaggaggggactgcacccatactgcttccctaccacaaatcagggctcagggagaggccatgcggccagcccaggtctgcatgctgagccccatcctccacagcttgccgctgacgctctctcctgtcaccccgcccctgctctctccccagatgtgttctgagctggatgccgggttccagaatcgctgcacagttccaacaggacagcgccttcccccatgcgctgggaggggaccctccatttctccccctcacccatgctgagtgtagagccggggcctgggtggcgggtgggggccgggtgggaggtggcagtagtcttagcctgtgcactctcttccttgggtgtttggtgctggctcctggggactacaaatcccagagtgcggtgtgcccggcctcatttctgatagatcccgcttgggggaggtggtgtatggttacggagctgtgcatcttgggacatgtagtagcccaggtcggcttgtcactcgctgtgagatggggagattttgtcttttgatttatccctgtagggctggcagggttgtagatgaagggggaatgatctgagccttggttcccctgacacgtcttgctagccccagggttagagtgggcagggcagagccgcgcagcacctgggagcggtacctttcccttgggcagcctggggtcccaggaacaagccagggcgagtggcatgtctgcctgagcagggtgtggccccagaaagctgaggagtgtgggctggcagagagcttcgagggcaaggccacccgcgggggcgtgtgtgtggtggggcttggcatgtgatggcagctccaggcatgccgctgcttgtatggctttctttggcctctgaccctgctgcccattctttccaacatcacagatgaactgcctctcctcctccctgcctggggagcccagtggccagggaggggagtggtggagccagtcgctgtaacactgagcctcagagacgaaccaaaaccagctgggctgagctcagatccagggggaaatgctggaagtcaataaaactgagttttgagagcttgaaaa

SEQ ID NO: 43 - DNA, 1873 bp, Homo sapiens
gacgatacgccgggcgcaggcgcagaagccgcgcccgtccgcggcgccgccagccagggcggaaacggctgcggcttcgctagggacgcatgcgcgggtcccttagttttcgcgagataacggtcgaaaacgcgctcttgtcgatttcctgtagtgaatcaggcaccggagtgcaggttcgggggtggaatccttgggccgctgggcaagcggcgagacctggccagggccagcgagccgaggacagagggcgcacggagggccgggccgcagccccggccgcttgcagaccccgccatggacccgttcctggtgctgctgcactcggtgtcgtccagcctgtcgagcagcgagctgaccgagctcaagttcctatgcctcgggcgcgtgggcaagcgcaagctggagcgcgtgcagagcggcctagacctcttctccatgctgctggagcagaacgacctggagcccgggcacaccgagctcctgcgcgagctgctcgcctccctgcggcgccacgacctgctgcggcgcgtcgacgacttcgaggcgggggcggcggccggggccgcgcctggggaagaagacctgtgtgcagcatttaacgtcatatgtgataatgtggggaaagattggagaaggctggctcgtcagctcaaagtctcagacaccaagatcgacagcatcgaggacagatacccccgcaacctgacagagcgtgtgcgggagtcactgagaatctggaagaacacagagaaggagaacgcaacagtggcccacctggtgggggctctcaggtcctgccagatgaacctggtggctgacctggtacaagaggttcagcaggcccgtgacctccagaacaggagtggggccatgtccccgatgtcatggaactcagacgcatctacctccgaagcgtcctgatgggccgctgctttgcgctggtggaccacaggcatctacacagcctggactttggttctctccaggaaggtagcccagcactgtgaagacccagcaggaagccaggctgagtgagccacagaccacctgcttctgaactcaagctgcgtttattaatgcctctcccgcaccaggccgggcttgggccctgcacagatatttccatttcttcctcactatgacactgagcaagatcttgtctccactaaatgagctcctgcgggagtagttggaaagttggaaccgtgtccagcacagaaggaatctgtgcagatgagcagtcacactgttactccacagcggaggagaccagctcagaggcccaggaatcggagcgaagcagagaggtggagaactgggatttgaacccccgccatccttcaccagagcccatgctcaaccactgtggcgttctgctgcccctgcagttggcagaaaggatgttttgtcccatttccttggaggccaccgggacagacctggacactagggtcaggcggggtgcgtggtggggagaggcatggctggggtgggggtggggagacctggttggccgtggtccagctcttggcccctgtgtgagttgagtctcctctctgagactgctaagtaggggcagtgatggttgccaggacgaattgagataatatctgtgaggtgctgatgagtgattgacacacagcactctctaaatcttccttgtgaggattatgggtcctgcaattctacagtttcttactgttttgtatcaaaatcactatctttctgataacagaattgccaaggcagcgggatctcgtatctttaaaaagcagtcctcttattcctaaggtaatcctattaaaacacagctttacaacttccatatcacaaaaaaaaaaaaaaaaaaaaaaaaaaaaaaaaaaaaaaa

SEQ ID NO: 44 - DNA, 31737 bp, Homo sapiens
gaattcctgggcctggggctgtggcagctgcctcgtcccttcacctcctggcttattctctccctccatatcttagcaatttcttcatgggaatgtccccaattagaaatttctattataccattatattaccaacatatatatatatacctggccgggcgcggtggctcatgcctgtaatcccagcattttggtaggccaaggcgggtcggatcacctgaggtcaggagttcgagggccagcctgatgaccatggtgaaaccccatctctactaaaaatacaaaattaatcgggcatggtggcacatgcctgtaatcccagctactcgggaggctgaggcaggagaatcgcttaaacccaggaagtggaggtttcagtgagctgagattgtgccattgcactccagcctgggtaacaagagcaaaactccatcaaaaaaaataatatatgtatatatatattacaattttatatatatatacacattatgtaattttttttaccattttatatatatacattacgtaatggtaaatgttttctctgccccccagtagattgttagctccagaagagaaggatcatgtctttggtttatctagatatgtccatcggcctggtacagtctctggcccatgttataggcaacaactacttgtagaatcggtgaatgcatgaatagaagaatgagtgaatgaatgaatagacgaaaggcagaaatccagcctcaggccgggcgtgggtggctcacacctgtaatcccagcactttgggaggccgaggcgggtggatcacaagatcaagagatggagaccaacctggctaacacagtgaaaccccgtctctactaaaaatacaaaacattagccgggcatggcggtaggctcctgtagtccgagctactagggagcctgaggcaggagaatggcatgaacccaggggggcggacgttgcagtgagccaagatcgcgccactgcactccagcctgggcgacagagcaagactcggtctcaaaaaaaaaaaaaaaagaaatccagcctcaaagagcttacagtctggtaagaggaataaaatgtctgcaaatagccacaggacaggtcaaaggaaggagaggctatttccagctgagggcaccccatcaggaaagcaccccagacttcctacaattactagacacatctcgatgcttttcacttctctatcaatggatcgtctccctggagaataatccccaatgtgaaattacttagcacgtcaagttaggtagatccttgtgtacttcttggttgttcagagatcatcaccagtgcaacatcccccatcatacacagcagtgtcttgcccctctcctccccaagccttccgaggcccttcctccgtgcctgaaccccctggacatatcatgtggcaaactgaagggtccaacgagatacaggaagtgaaacacgatgtacactgaaacgtgcaatacaaatatgcagcatgaagtgcctcggttcactaacccgagctatgctgggtgcttcttttctaccactttccttaatgcctatggacacctcattctgtggctgaagttccttgtgttcaattccccccatcttcattgaacatcctctgtgcagggacttgacccctgtcctgctagctttgcactgaggcaagttttgtccatgcctagtagtgccacatctttactagatgaggtttctaaagagcttggcatggaaggaaagcctggggggccttagaagccatcacttaggaactgggagagctccaggcaagccaccttatctctttgggcctcagtatcctcactcacatccccatggtcagtagagtgccaagcacatggtggacacgcagaagtattgatcatcttcctcacctcccctaggagagcccttggaatccccatataatattctctgaagacctcaatccaatgagccgagtaattgactcggtagcaaactcatggaaaggacattagaagccaaaaggaggtagagtatgtcccagtacaataaccagcctctgatctcaaggaagaaagaacagagctgcaggtgagaagtgtgcgcctcaaatcaccaaagtgagagtggaaggagcacccaccagtcccttggaggcgatccctaagaccggtgagaatggcttcgaaaaatgtgatcgtcctcaaccccacagtcttgaacctaacaggagatcttgaagcctgaaagacaccactttaggatcaacagcagatctgtgactttccacagcaggcacacagaaccctagagttagtcgaggttggacataggaagggcttccaaacacacagagaaattcatggatcctaaattataaagggaggttctttaaaagaaccaagatgattctgagatttatcctgagctttttttttttttttttttttggatgcagagtctcgctctgtcgcccaggctggagtgcagtggcgtgatctcggctaactgcaacctccacctcgcgggttcaagcaattccctgcctcggcctcctgaatagctgggattacaggcgcctgccaccacacctggctaatttttgtatttttagcagagacgggatttcaccatcttggccaggctggtcttgaactcctgatctcatgatccacccaccttggcctccctaagtggtgggattacaggcgtgtgcccaacttttcctgagccttttgaggctgacaccagaggtagaagcccagcctctccccactggccatgtggggagaggctccagcctgcagcaaccagggatctggcctcaagtgatgccccaacagtgggcgacttcccagtactgttaggagaatcccaagtctaattcaaagttgattttttactagcaattaatgatagacatggtctccattgctcaaggctctgggaagatctagactagagaaaacgatcaccgacttctaccacacctgtgggcctcagttcttccctctggtccatggttaccacagtaaccccttgtaaaggtgtttccccaggggtccctagagtcctctgagtcaccataattctgggtcaacagaaatggagaggtaagaggagacactcccctgccctggctggtcccacgtgttcatggcagtaacctgtctggggagcctcgccacccctgtgtccacctgcagagttatgcagtggtccccaactagggcccctgccaccctcattcctaagggaggctggagacttcttccatggccgaaaatccacatctaagtccccggcactagcaaaaaggccctgtcatgggggctccctgccccagttgagattggaggaacatggaagaagctaaaataactaaataactcagtagcatcacactacctgctctggagaaaaaaaaatttaatattattattttttgttttttgagatggagttctgctctgctgcacaggctggagtgcagtggcgcaatcttggctcacggcaacctctgcctcctgagggttcaagtgattctcccgcctcagcctcccgagtagttgggattacagctcatgccaccacgcccagctaatttttgtacttttagtagagatggagttttgccatgttggctagtctggccttgaactcctgacctcaagtgatccacccacctcaaagccacccaaagtttggggattacaagcgtgagccactgtgtccggcctggagaaaggactttaaatgacgcaatgtaggaagagcaaggttgtggagatctgctgccctggctgaggtagctcatgcaatcagtctctctgagccacagtctcttgatctgtgaaatcggaagaaaataatacctccttcacaagacaagtggcaggtcagatgtgagaatgcacaggcaggccctcggcaactggaaaagctctatacagatctgaaaaggaggaggagaaaaaagaggaggggcttccatggctggacagggcatctttctttttctttttctttttttttttttttttttttttgaggtggagtcttgctctgttgccaaggttggagtgcagcagcacgatctccgctcactgcaagctctgcctcccggattcacgccattctcctgcctcagcctcccgagtagctgggaatacacggtccgccactacgcccagctaacttttttgcatttttagtacagagtggatttcacctggttagccaagatggtcttgatctactgacctcgtgatccgcccgcctcggcctcccaaagtgctgggattacaggcatgagccaccgcgcccagcctgatagagcatctttcggcgtgatgtgttctgagttccaaagctgaggaagagactcaaatcttcaagagctcttctaactttgagattctctgatggtttcagggctatgggaggaagagcttgtggtccgtgtctgctcccgggatttctgtttcttggtttgtgtctctgctgcaagtccaaggagctggggcaataccttgagtctgggttcttcgtccccagggacctgggggagccccagcaatgctcagggaaaggggagagcaaagtgtggggttggttctctctagtggtcagtgttggaactgcatccagctgactcaggctgacccaggagtcctcagcagaagtggaattcaggactgaatcgtgctcacaacccccacaatctattggctgtgcttggccccttttcccaacacacacattctgtctggtgggtggaggttaaacatgcggggaggaggaaagggataggatagagaatgggatgtggtcggtagggggtctcaaggactggctatcctgacatccttctccgcgttcaggttggccaccatggcctgcggccagagggcacccacgtgacccttaaagagaggacaagttgggtggtatctctggctgacactctgtgcacaaccctcacaacactggtgacggtgggaagggaaagatgacaagccagggggcatgatcccagcatgtgtgggaggagcttctaaattatccattagcacaagcccgtcagtggccccatgcataaatgtacacagaaacaggtgggggcaacagtgggagagaaggggccaggtataaaaagggcccacaagagaccagctcaaggatcccaaggcccaactccccgaaccactcagggtcctgtggacagctcacctagctgcaatggctacaggtaagcgcccctaaaatccctttgggcacaatgtgtcctgaggggagaggcagcgacctgtagatgggacgggggcactaaccctcaggtttggggcttctgaatgtgagtatcgccatgtaagcccagtatttggccaatctcagaaagctcctggtccctggagggatggagagagaaaaacaaacagctcctggagcagggagagtgctggcctcttgctctccggctccctctgttgccctctggtttctccccaggctcccggacgtccctgctcctggcttttggcctgctctgcctgccctggcttcaagagggcagtgccttcccaaccattcccttatccaggctttttgacaacgctatgctccgcgcccatcgtctgcaccagctggcctttgacacctaccaggagtttgtaagctcttggggaatgggtgcgcatcaggggtggcaggaaggggtgactttcccccgctgggaaataagaggaggagactaaggagctcagggtttttcccgaagcgaaaatgcaggcagatgagcacacgctgagtgaggttcccagaaaagtaacaatgggagctggtctccagcgtagaccttggtgggcggtccttctcctaggaagaagcctatatcccaaaggaacagaagtattcattcctgcagaacccccagacctccctctgtttctcagagtctattccgacaccctccaacagggaggaaacacaacagaaatccgtgagtggatgccttctccccaggcggggatgggggagacctgtagtcagagcccccgggcagcacagccaatgcccgtccttcccctgcagaacctagagctgctccgcatctccctgctgctcatccagtcgtggctggagcccgtgcagttcctcaggagtgtcttcgccaacagcctggtgtacggcgcctctgacagcaacgtctatgacctcctaaaggacctagaggaaggcatccaaacgctgatgggggtgagggtggcgccaggggtccccaatcctggagccccactgactttgagagctgtgttagagaaacactgctgccctctttttagcagtcaggccctgacccaagagaactcaccttattcttcatttcccctcgtgaatcctccaggcctttctctacaccctgaaggggagggaggaaaatgaatgaatgagaaagggagggaacagtacccaagcgcttggcctctccttctcttccttcactttgcagaggctggaagatggcagcccccggactgggcagatcttcaagcagacctacagcaagttcgacacaaactcacacaacgatgacgcactactcaagaactacgggctgctctactgcttcaggaaggacatggacaaggtcgagacattcctgcgcatcgtgcagtgccgctctgtggagggcagctgtggcttctagctgcccgggtggcatccctgtgacccctccccagtgcctctcctggccctggaagttgccactccagtgcccaccagccttgtcctaataaaattaagttgcatcattttgtctgactaggtgtccttctataatattatggggtggaggggggtggtatggagcaaggggcaagttgggaagacaacctgtagggcctgcggggtctattcgggaaccaagctggagtgcagtggcacaatcttggctcactgcaatctccgcctcctgggttcaagcgattctcctgcctcagcctcccgagttgttgggattccaggcatgcatgaccaggctcagctaatttttgtttttttggtagagacggggtttcaccatattggccaggctggtctccaactcctaatctcaggtgatctacccaccttggcctcccaaattgctgggattacaggcgtgaaccactgctcccttccctgtccttctgattttaaaataactataccagcaggaggacgtccagacacagcataggctacctgccatgcccaaccggtgggacatttgagttgcttgcttggcactgtcctctcatgcgttgggtccactcagtagatgcctgttgaattcctgggcctagggctgtgccagctgcctcgtcccgtcaccttctggcttcttctctccctccatatcttagctgttttcctcatgagaatgttccaaattcgaaatttctatttaaccattatatatttacttgtttgctattatctctgcccccagtagattgttagctccagaagagaaaggatcatgtcttttgcttatctagatatgcccatctgcctggtacaatctctggcacatgttacaggcaacaactacttgtggaattggtgaatgcatgaatagaagaatgagtgaatgaatgaatagacaaaaggcagaaatccagcctcaaagaacttacagtctggtaagaggaataaaatgtctgcaaatagccacaggacaggtcaaaggaaggaggggctatttccagctgagggcaccccatcaggaaagcaccccagacttcctacaactactagacacatctcgatgcttttcacttctctatcaatggatcgtctccctggagaataatccccaaagtgaaattacttagcacgtccagttaggtagatccttgtgtacttcttggttgttcagagatcatcaaccagtgcaaacaatccccccatcaatacacagcagtgcctgcccctctccccccgaggtcttccgaggcccttcctccgtgcctgaaccccctggacatatcatatggcaaactgaagtgtccaacgagatataggaagtgaaacacgatgtacactgaaacgtgcaatacaaatatgcagcatgaagtgcctcggttcactaacccgagctacgctgggtgcttcttttctaccactttccttaatgcctatggacacctcattctgtggctgaagttccttgtgttcaattccccccatcttcactgaacatcctgtgtagggacctcacccctgtcctgctagctttgcactgaggcaagttctgtccatgcctagtagtgccaccacctttactagatgagacttctaaagagcttggcatggaaggaaagcccgggggccttggaagccatcacttagaaactgggagagctccaggcaagccacctcatctctttgagcctcagtatcctcactcacatccctatggtcagtagagtgccaagcacatggtggacacgcagaagtattgatcatcttcctcacctcccctaggagagcccttgggaatccccatataatattctctgaagacctcaatccaatgagccaagtaattgactcggtagcaaactcatggaaaggacattagaagccaaaaggaggtagagtatgtcccagtacaataaccagcctctgatctcaaggaagaaagaacagagctgcaggtgagaagtgtgcgcctcaaatcaccaaagtgagagtggaaggagcacccaccagtcccttggaggcgatccctaagaccggtgagaatggcttcgaaaaatgtgatcgtcctcaaccccacagtcttgaacctaacaggagatcttgaagcctgaaagacaccactttaggatcaacagcagatctgtgactttccacagcaggcacacagaaccctagagttagtcgaggttggacataggaagggcttccaaacacacagagaaattcatggatcctaaattataaaggcaggttctttaaaagaaccaagatgattgtgagattacgtagagtttttttttgtttttcttgatacagagtctcgctctgttgcccaggcaggagtgcagtggcatgatctcagctcgctacaacctccacctcccgggttcaagcaattccctgccacagccacctcgagtagctgggattacaggcacctaccaccatgcgcagctaatttttctatttctagtagagacgggatttcaccatcttgaccaggttggtcttgaactcctgacctcatgatccacccaccctggcctcccaaagtggtgggattacaggcatgagccactgcgcccggcctattctgagccttttgaagctgacgccagaggcggaagcccagcctctccccactggccatgtggaggctctccctgagtagtctctcagcctgcaggagccaaggatctggacccaagtgatgccccaacagtgggcaacttcccagtactgttaggagaatcccaagtctaatgcaaagttgattttttaccagcaatgaatcgatagacatggtctccattgctcaaggctctgggaagatctagactagagaaaacgatcatcgacttctacccacacctgagggcctcagttcttccctctggtccatggctgccatggtaaccccttataaaggtgtttccccaggggtccctagagtcctctgagtcaccataattctggggtcaacagaagtggagaggtgagaggagacactcccctgccctggctggtcccacgtgttcctggcagtaacctgtctggggagcctcgccacccctgtgcccactgcggagttatgcagtgtccccaactagggcccctgccaccctcattcctaaaggaggctggagacttcttccatggccgaaaatccacatctaagtccccagcactggctaaaaggccctgtcatgggggctccctgtcccagctgacattggaggaaggatggtgggggaggcagggaccttcttctacttggagctcagggaccctcttccattcgcacctggctcctcctctttgctggtgctggaaggagcaggggaaagtggtgactccaccctcccttggccccatatttttcggagctggtatcatcgatgacacccctcttggatcctcacacaggcctgcctggagaacagctcacagcacagtgccctcccagcaggtgatgagtctggggtgctggtccggtaatgcttcaggagtgacggcagaaaaaggagctctgtcttcccctctgaaagtagggagatggcagggccccagcattcacatcctaggccacaggggtgtgggtgttcaatgttggttgccaacaccacagccaatcacttctagaagcatttgcttgtttgcttgcttgtgtttctacagtgtcaagtgctacatgctcttaaactcagggtgggggaagatttcaccactggagagggtggtctttcctgctcttatccctgggggcatctgatgcttgtgacttccagatggtatggaaatagccccaaccctgggcaccaggagacaggaggctcagtcctggccttctccgcctcagccttgtcctgctgtgaggtttccacaaggcaccccatgccactgggccattctcacctgggaattgagaaagaacaatctgccccttatggaaagacaaaatgaggcaaagggcccctgtgttgggggcaggatccctgcactcagagggatttagaagctgaaataactgggttgggggcggtgactcacgccagtaatctaagtacttagagaggccagggagggtggatcccctaaagtcaagagttcgagaccagcctggccaacatagtgaaaccccgtctctactaaaaaagtacaaaatttagcctggcgtggtggcgggcgactgtaatcccagctactaaacagggtgaggcaggagaatcacttgaacccaggaggtggaggttgctgtgaggcaacatcatgccactgcactccagcctgggtgacagaatgagactccaactgaaaaaaaagaaagaaagagagagagagagacaaagaggaaggaaagaaagaaagaaagaaagagaaagaaagaaagaaagaaaaggaaaggaggaaggaaagaaaaagaaaaagaaagaaagagaaagaaagaaagaaagaaagaaagaaagaaagaaagaaagaaagaaagaaagaaagaaagaaagaaagaaagaaactaaaataactaaataactgagtaacaccacactacctgttctggagaaaggacttttttcttgttgttgtggttgttgaaatggagtcacactctgtcgcccaggctggagtggagtggcgcgatcttggctcacagcaacctctgcctcctggattcaagtgattctaccacctcacctccggagtaactgggattaccagttccgccaccacacacagctacttttgtatttctagagagttggtgttttgccatgttggctagtctggccttgaactcctgacctcaagtgatccacccacctcagcctcccaaagtgctgggattacaggcatgagccacgtgcccggcctggagaaaggactttaaatgacacaaagtgggaagagcaaggctgtggagatctgctgccctggctgaggtagctcatgcaatcagtctctctgagcctcagtctcctgatatgtgaaatgggatgatactcatacctcctacacaagacaagtggcaggtcagacgtgagaatgcacaggcaggcccttcgcaactggataggctctatacaggtgtggaaaggaggaggagaaaaaagaggacgggcttccatggatggatagggcatctttcggcgtgatgtgttttgagttccaaagctggggaagagattcaaatcttcaagagctcttccaactttgagattctctgatggtttcagggctatgggaggaagcgcttgtggtccgtgtctgttcccgggatttcggtttcttggtttgtgtctctgctgcaggtccagggagctggggcaataccttgagagtctgagttcttcgtccccagtgacctgggggagccccccacccaacccccccccccctccgccccgccccaaggctcagggaaaggggagatcaaagtgtggggttggttccctctagtggtcagtgttagcactgcatccagctgactcaggtgggcccaggagtcgtcagcagaagtggaattcaggactgaatcatgctcacaacccccacaatctattggctgtgcttggccccttttcccaacacacacattctgtctggtgggtggaggttaaacatgcggggaggaggaaaggaataggatagagagtgggatgtggtcgataggggtctcaaggactggctatcctgacatccttctccgcattcaggttggccaccatggcctgctgccagagggcacccacctgaaccttaaagagaggacaagttgggtggtgtctgtggttgacactctgtgcacaaccctcacaacgctggtgacggtgggaagggaaagatgacaagccaggggacatgatgccagcatgtgtgggaggagcttccaaattatccattagcacaagcccgtcagtggccccatgcataaatgtgcacagaaacaggtgggggcaacagcgagagagaaggggccagggtataaaaagggcccacaagagaccagctccagcatcccaaggcccgactccccgcaccactcagggtcctgtggacagctcacctagcggcaatggctgcaggtaagcgcccctaaaatccctttgggcacaacgtgtcctgaggggagaggcggcgccctgcagatgggacgggggcactaacctcaggtttggggcttctgaatgtgaatatcgccatctaaggccagatatttggccaatctctgaatgttcctggtccctggagggatggagagagagaaaaagaaaacagctcctggaacagggagagtgctggcctcttgctctgcggctcccttcttgccctccggtttctccccaggctcccggacgtccctgctcctggcttttgccctgctctgcctgccctggcttcaagaggctggtgccgtccaaaccgttcccttatccaggctttttaaagaggctatgctccaagcccatcgcgcacaccagctggccattgacacctaccaggagtttataagctcttggggaatgggtgcgggtcaggggtggcaagaaggggtgactttcccccactggggaagtaatgggaggagactaaggagctcagggttgttttctgaagcgaaaatgcaggcagatgagcataggctgagccaggttcccagaagagtaacagtgggagctggtctccagcatagaaagcagtggtccttcttggtggggggtccttcccctaggaagaagcctatatcacaaaggaacagaagtattcattcctgcatgactcccagacctccttctgcttctcagactctattccgacatcctccaacatggaggaaacgcagcagaaatccgtgagtggatgctgtctcctaggcggggatgggggagacctgtggtcagagcccccgggcagcacagccactgccggtccttcccctgcagaacttagagctgctccacatctccctgctgctcatcgagtcgcggctggagcccgtgcggttcctcaggagtaccttcaccaacaacctggtgtatgacacctcggacagcgatgactatcacctcctaaaggacctagaggaaggcatccaaatgctgatgggggtgagggtggcaccaggggtccccaatcctggaagcccactggcttcgagggctgggggagagaaacactgctgccctcttttcagcagtcaggcgctgacccaagagaactcaccatattcttcatttcccctcgtgaatcctccaggcctttctctacacctgaaggggaaggaggaaaatggataaatgagagagggagggaacagtgcccaagcgcttggtctctccttctcttgcttcactttgcagaggctggaagacggcagccacctgactgggcagaccctcaagcagacctacagcaagtttgacacaaactcgcacaaccatgacgcactgctcaagaactacgggctgctccactgcttcaggaaggacatggacaaggtcgagacattcctgcgcatggtgcagtgccgctctgtggagggcagctgtggcttctaggggcccgcgtggcatcctgtgacccctccccagtgcctctcctggccctgaaggtgccactccagtgcccaccagccttgtcttaataaaattaagttgtattgtttcatctgactaggtgtccttctataatattatggggtggaaggtggtggtatggagcaaggggtaggtgggaagacgacctggagggccttcagggtctattgggaactaggccactgaaatataagaggtttggctgttcctgggccagaaaaaggctgacatatcactgctgtctattactcactaaggccattccaccagctcagtggtcccagcttgctggtcatagctcattggtcatcccagagatgacttgaaggcatttcttcctcccccaccatcaccagcaacaccaaacctagccccccaggagcgggaagaaatgaaaacaagatgggctattaagtgcagaggcaaaaactccccaacaggtgaggaaacaatggcatagaattacttgtgttcggaagaattttaagatgaatattccttaagcccaactactctcgggaaatgagaacaatgcaaaaatgagtttgagacatatggttccagagcatttggaatctgaattagggcaagggaagtggaagagagattttatttgcgggttgtaaatgcagtgccaacaggtgccaggtagataacaacgtaagcaatgagggctggatggcaggggataaatcccagatgacactcgcttccttcaggggatgcaacacagaagggtgggaaccagcacaatctgcagaactcaagcccctgctgaggtgggacccagcccgcctgtcaccatcaggactgcagggacacggcttccagaccttctgattctttgagacagccaggacatccagactgttacgggaaatctaatatttaaataatggcaacacatactgaaaatcttttaagggcaaaaattaacccaaacacacatggtctccaagctgtctgtgagcaattttgttctaagagatgttgattggggtaacttggtgtaagggaaagaatcagaaagatttgggctgtatgcaatttagtgtcgctgaataaattacttgaccaagctgagataataatatattgctttacaaggattatgtgaggattaaatgcaatggtatttttgacatattatagtactgaagaaattgtagttatttctgcattgaatttttggatgttttataataataataaacatctgagatgtttattatttccaaataagcactaaagagcggtggttagttaagagtttactctcccaagcaccttggctaagtgactggtgacctaaatctatactaagatgctcacaggaactctagtatccaaaaatgatttcatgaagtcaggaattattttacaatgcaaataatcaaccccctaattaatcttctttagaagttctgattcttatgtgccataatgaatttttttgataacgagacccacttgtgttcatttttggctattttgcagttaataactcagtccttgggaagtggttcaaagctgaactaatcagaactctagagctgctgcatttctcagctcagaagacattcctgcatcttacgttgttcttctactattggaatttaaaattacggcattttggagttagaagggcctcataagtcagtctagtttcttctactttgggaatcttatcctacagcgtccattacagtcagtattccaattacaagtgtgtagcactagaaccaagggaatccctttcacaaggctcttcattctaataaaccactctcattgcagaaaactatttcttgcacaaagctggaatcaatattcctgcaatgtccttcatttggccttaaaattatttagaaatctcagtctttagaagtcgatggaatgagcacaattataattatctctcggcttgcgtgttttaaaaggaaatgtgagccatcttaataagtatttgttgaatgcacgtgacagtggaatgacaatgtccagcgcctacttgggtggctaagagggttctaaagtggggtggtcataacatataactgaactgcagggggagccacacgccagagactgtccacccagctcccctcgggtataggagaatccactcaaccactgctggttgagaattagaaagatactacctgactttgcacattttagaatataaaaagaccttaaagaccatctgctttaaactctttgatttacctactgttagtctacctttcagctcatcaacttggtgtggacggcaatttccgctgcaaatttgagatgcctagggtgttttctaaacgatgcattcgtgagccctcactccctgagattctgatataattagcctggaatgtggtccaggcaagagtagtttgaaaactttcccaggtgattctatcatgtaaacaaggttgagaaccactgtgttagggaccgcaaagatgagacccatgtgttcacagctgttgtattggtggaacagggaaaacggagaaaaaggagacgagaggcctgggccagttgtggtgccacctgctcctaattccaaccagtcatctaaaaagtgtttatcgtgagccagtcacagaaagacaaatactctctgattccagttagatgaggtactcagagcagtcaaattcgtagagacaaaaagtaggatggtggctgccagtggctgtggggagggatggaatagggagccatttaacgagcacagggtttcagctgtgcaagatgaaaagggttctggagatggttggtggtgagggttgcatgacgatgtcaatgtacttgacgtgaccgaactgtacacgtaaaatggttaagatggaaatgtttatatcttctcacaactaaaaattgttaatagtttcttttgtttttgtttttgtttttgagacagaggctggagtgcagtggtgggatcttggctcactgcaacctccgcctcctcccgggttcaagtgattctcatgcctcagcctcctgagtagctgggattataagtgtgcaccaccacacagggcagatttttgtatttttggtaaagacagggtttcgccatgttggccaggctggtctcaaactcctggcctcaggtgatccaccctccttggcctcccaaagtgataggattacaggcgggagccaccaggcctggcccttaatggtattttctaatgaaaactcttcctgaagataagattatcgagactcgcacagggaagagttcagcaggcagagctccagtcatccttgacccctggcataatgttttactgactctgtcatttttttgaatttaccctaacctaaaatgaccacttctgaatatcttccatgagcattgttgaaatacacatggttggttttgtccctttatacacagttgagagcagaactgaccccttcctttttcttctgaattgtagggtctgggcttctcagccaagacaagctgacactttgcctggatgcttctttaattcagaaggccctggagtgctgaggcacacaatgagtacctctgggattagggtcaccaactcgtcctggtttgcaggagactttctcaatgtcaacactgaaagtcccacgttccttccagaatccctcagctcaatgcaaactcagctcacaggactggtcaccctattagtagtcctaaatcttagggcaccaaactggggggaaagtaggggaaggagcaagaaaaagactagaaaaaccggaaagctgtgcacagtgtatatgacctttgatggccctcatggttatcatggatttctgattcttgctttgagtttactgtgattataatgatgtgcttaattaccactagaattatcagtgtaataataaaaaccaacaaatgtgaacacatgtctccagcaccatgctagtttattacaagtattatgtcatttctttctaactataattctctaaggtaaatactattattaatcctatggtaagaagtcccactaacgatgtaacttatgctttctcaggtctagagagaaagacaccagaatgtcaccctgaccatccttgagagcataaatggccaggcactgtggctcacgccagtaatctcagcactttggagggctgaggcgggaggaggtcacaagttcgagataagcctggccaacatggtggcaccccgtctcttactaaaaaatacaaaaattagccaggtgtggtggtgcacacctgtattcccagctacgaaggcatgagaatcgcttgagcccgggaggcagtgttgggctgggcccatcatgccactgcactccagctgggtggctgaggaagattctctctcaaaaataataagaaagaagataaaattttggagtattaaaggccactcttcctctggagataatcaaggtagctgcaatttaagtatgagctggttgctttaatgttcagaaagaatatgatcaaaaccatttagagggtggggcctcctcctatagacaatgaaggcaactacccttagaagctctattatactggaaaagagatatgagatccttcttgctttaagaatcaatgaagccgggcgtggtgactcactcctgtaatcccagcactttgggaggccgaggtgggcagatcacctgaggtcaggagtttgagaccagcctggccaacatgacgaaatcctgtttctactaataacacaaaaattagccaggtgtggtggtgcacacctgtaatcccagctactccagaggctgaggtaggaaaattgcttgaagccaggaggcagaaattgcagtgagccgaggtcgtgccactgcattccagcctgggagacagagccgagactccgtctccaaaaaaaaaaaaagaatcaatgagaaaggcctgcctgatctctggttgtgtggatccttcgggaaggaaagtgaacagaggttccaagtctacaagggaaaaagcccagcctactctgaagagctttgcgggacggctcatccaaactactgagctctaagaactggaaagctggaaaccccagcaagaggacacctgcagagctggaccaggccccgaagaagcagatcatcctccctcagagatctacagcaggtgggaacccagatctgcagacccgcttggtttgagggtactgtgtgggaccatctgtcaacactgacaccctgtagcagtgagaagcaaaggcagcagccggctgagcctccaggctcgccctgctggaactagaaagtccaagtggcccccttcttcctccctttttggttttgtttgcttttgtttttgttttgttcaagatggggtctcgctttgttgcccaggctggagtgcaatggcacgatctcagatcactgcaacttctgcctcccacagtcaagcgattctcctgcctcagcctccccagtagctgggattacaggtgcacaccaccatgcctggctcattttccccttccttgttggattcgctgtgcttcaaggcactgaggccatgaggcagggtttgcagatacaggatatctacagccctgatgcgactgatcctgacaccaaaatggctgtggatccctgcatggtgtggctgtatactcctgtctcttaaacctgcttcttaacttacttccccaaatgctcaattcagggaaggtggatgatttatattagactcacatgatgaaggagcagtagctccacctagtggaaacattgaggttgaaaaggtcatgttccgggatgatgctattttataaagtcaagatatttcgtgtccctccaggaagccttccttgattcgagttatgctttctcttaacaatctgttttcccagtcataggagttcatgcacaaatgtaatctcctacttgtttgtcttgctttcctaataaatttgtggaagccaggaacaatgttttgttcaccactgtatccccactgccttgtatgtggtgaaaccaaagggttacttttacacttaatctatagcaccagactcaggggaggtctgggaagaatgggaaaacgttttccctctgctgtctgatgccatggttttttctagctggtatctgcaatttggaaagctatggacctctctctatctggaagtctgaactttagcttttctttttgcttgtgtttcctttgttttgcttttgagacagggtctggctatgtcacccaggctggagtgcagtgcatgatctcaactcgctgcaaccctccacctcccgcgcccaagtgatcctcccacctcagactctcaagtagctgggactacaggcacgtgccactatacctggctaagttttgtgttttttgtagaaatggggtttgccatgttgcccaggctattcgcaaactctggggctcaagtgattcgcccgcctcagcctcccaaagtgctgggattacacgctgagccaccgccccggcctgaatttcagttttgaaagcagtttacataggctgccaccctgagctaatgcaccccctgccccgggctggttgtttatgctatcaacacggtattttttccttagaaattgtacttaaagttataaaatgcagccgggagcggtggctcatacctgtaatcccagactttagaaggccgaagtgggtggatcacgagatcaggacttcaagaccagcctggccaagatggtgaaaccctgtctctactaaaaatacaaaaaattatctgggcatggtgatgggcacctgtaatcccagctacttgggaggctgaggcagagaaatccttgaacccaggaggtagaggtggaagtgagccaaaatcacgccattgcactccagcctgggcaatagagcgagactgcatctgaaaaaaaaaaaaagtgataaaatgcaaccatttgacataacaagagctttcagcaatgacacagaagggaagggaactgcatttggacatcataaaaccacttttatttttaccatagcaacattccagtgaacatttcttgactgacttgggagaaaatatctggttttgtgattcctcacgccttctccgagggtgaatatactctttccgaaggacagggaaggaggctgaaccataaaatcatatgaacattttcacaagaggattcctcttgaagcttcaaggaaattgtttacagtcagaagaaaatatgcacttcttgatgaaaacagagagtaaacattgcaactctaacctagacacctatatgggtaaaaaaaagaaaactggcaaatgcgaactcacagttgatcactctatgaaaaggaattcagagatgtttggagctcttaacctaagaggccaatttcatggaagaactctaccttctacttcagagacagaacactgggctagatacgatgcttgtctggcccgaagtggaatttcttaccatctgtatactcccccaagacccacaacagatggttactgagttgcagcttgccactgatccttaatgatgtcaacaagctcagctctgggagctggcactccagaagcccaggtcaggggagcaagggaaagtggagatgggaacagagctctgattcctagccccatatttgatacttactcccttcaaagtcctgtccatggactacaaatttagctcccagttagtaatcaaaaacccatgaaatatgagttgtatttctaagatatgcctgactgtagtatgatgtttaagagaaaagggcagtgagaaccatgaagaaacggcaagatcttttctttttttttttggatctaagagtggactgatgaagcacctggcaaggagcaagaggccttcttacaaatcaaacattgagactgagattcctaatgactagggtgagctctaaagagaaaggtggctgggcgcggtggctcacacctgtaatcccagcattttggggggccaaggtgggcggatcacttgaggtcaggagtttgagaacagcctagccaacatggtgaaaccccatctctacgaaaaatacaaaaattagacaggcatggtggtatgcacctgtaatctcagctactggggaggctgaggcaggagaatcacctgaaccaggaggctgaagttgcagtgagcgagatcgcatcattgcatccagcctaggcgacaacagtgagactccatctcaaaaaaaaaaaagagagagagagagaatggtgagattgtggacatattggacacacaggacatggggcatgggggcctgaaacaccgttttacaggacagatgtacacaaataggaatgcagcctgccattgtgtttcttcctttctcctctatcccttctcccatccctgggaaaccacagtagcagaagtctcattcaatcaaatagctgtcaattatatgagttgtacttttctcttcctgaacagcaaatggctttcctcctctttgtcctcctctttctgcctgtagagcaatttcctcctgtctactttgcagggccgatagctcaaatacagtgctatggtgatgacacccgactccaagggcaacggtaataatgacaaagagggtagagctgattccttcatccagtcctgcccaagcacagaagatagagttaggaaagtctgagagtacaaagatcacccaccccagcccacaggcccacttctgagtctcattcttcccaacctagtagaatctttcttattttcatgcttggataagaatcccaaacccctgaggtttccatcctgggcctggcagcagggcagcaaaggttaccttgaacaatgacagcaatgtctttgctgacagagcccagctggttagtggctgtgcgagcagtaggttccagtgtggttctgggttgccttctgtggcacttcaaggtcaaagacaccccattccaggtacacaccaaggctggagctgggtttccctttggacgcaggcgagcgtgtgttccatcccttccagccaggtctgtttggcagagcaactggattcctctaaccatggcttgtctgcaaaaacagtttcccaaagagctgaagttcagtgcaccacactccctccctaccttcaccccctgctccctctcctcccctcacccaaatgctgtccccttcactcaacagctttccttcccaagggagcactagcagctccctgctttgagccaactcttctttcccactttccgtatgggcagggagtcccagatgaaacctagggtgttcttatggatttggactaaaatataatgctgctctgtccatggtggccctggggcccctgcttcccatgtttgtttctcggtgggtaaggagctaggtaacagtgaactcagagatgaggatttttctacttttctttttggttttttcgttgttttgtttgtttctttctttgtttgtttgcttgtttttgagacaagtcagtctcacttcttcgccctggctggagtgcagtagtgtgatctcggctcatgacaacctctgcctcccgggttcaagcaattctcgtgcctcagccgctccagtaactaggattatcggcaaatgccaccacccccgctaatttttctatttttagtagagatcagtttcacctgttggccacgctggtctcaaactcctgacttcagtgatccacatgtctcagcctcccaaatgttgggattacagcatgagccaccacgccggcctatcctgagccttttgaagctgacgccagaggtgcaaagcgcagcctctccccactggccacgtagaggctcttgttgggtagtctctcagcctgcagcagccagggatctggcctcaagtgatgccccaacagtgagcgacttcccagtactgtcaggggaatcccaagtctaattcaaagttgattttttaccagcaatgaatgatagacatggtctccattgctcaaggctctgggaagatctagactagagaaaatgatcattgacttctacccacacctgtgggcctcagttcttccctctggtccatggttggcatggtaaccccttacaaaggtgtttccccaggggttcctagagtcctctgagtcaccataattctgcggtcaacagaaatggagaggtgagaggagacactcccctgccctggcagtcccacatgttcctggcagtaacctgcatggggagcctcgccacccgtgtgcccactgcggagttatgtagtggtccccaactagggcccctgccaccctctttcctaagggaggctgcagacttcttccatggccaaaaatccacatctaagtccccagcactggctaaaagaccctgtcatgggggctccctgtcccagctgacattggaggaaggatggtgggggaggcagggaccctcttctacttggagctcagggaccctcttccattcccacctggctcctcctctttgctggtgctggaaggagcaggggaaagtggtgactccaccctcccttgaccccatatttctcagagctggtatcatcgatgacacccctcttggatcctcctacaggcctgcctggagaacagctcacagcacagtgccctcccagcagatgatgagtctggggtgctagtccagtaatgcttcaggaatgacggcagaaaaaggagctctgttttctgctctgaaagtggggagatggcagggccccagcattcacatcctaggccacaggggtgtgggtgttcaatgttggttgccaacaccactgccaaccacttctggaagcgtttgcctgtttgtttgcttgtgtttctacagagtcaagtgctagatgctcttaaactcaggggggaagatttcaccactagagagggtcgtctttcctgctgccatctctgggggcatctgatgcttgtgacctccagattatattgaaatagccccaactctgggcaccaggagacaggaggctcagtcctggccttctctgccttcaccttttcctgctgtgaggtttccacaaggcaccccatgccactgggccattctcacctgagaattgagaaagaacaatctgccccttatggaaagacaaaatcaggcaaagggccccttgtgttgggggcaggatccctgcactcagagggatatagaagctgaaataactgggttgggagcggtggctcatgccagtaatctcagtactttgggaggccagggagggtggatcacctaaagtcaagagctcgagaccagcctggccaacatagtgaaaccccgtctctacttaaaaagtacaaaacttagcccggcatagtggcgggcgcctgtaatcccagctactagggaggctgaggcgggagaatcactggaacccaggaggtggaggttgctgtgaggcaacatcatgccactgcactccagcctcggagacagaatgagactccatcaaaaacaagaaagaaagaaagacaaagagagaaagaaagaaagaaagaaagaaagaaagagagagagagagagagagagagaaagaaagaaagaaagaaagaaagaaagaaagaaagaaagaaagaaagaaagaaagaaggaaagaaagaaaggaaactaaaataactaaataactgagtagcaccacaccacctgctctggagaaaggacttttgttgttgttgttgttgttgttgtcgttgttgtggttgttgaaatggagtctcactctggcgcccaggctggagtgccatggcccaatcttggctcacggcaacctctgcgtcctgggttcaagcgattctacctcctcaccctccggagtaactgggattgcaggcttctgccaccacacacagctacttttgtatttttaagagatggagttttgccatgttggctagtctggccttgaactcctgacctcaagtgatccacccacctcagtcttccaaagtgctgggattacaggcatgagccaccatgcccggcctggagaaaggactttaaatgacgcaatgtgggaagagccaggttgtggagatctgctgccctggctgaggtagctcatgcaatcagtctctctgagcctcagtctcctgatctgtgaaatgggatgatactcatacctcctacacaagacaagttgcaggtcagacgtgagaatgcacaggcaggcctttgacaactggataagctctacacaggtctggaaaggaggaagagacaaaagaggacgggcttccatggctggatagggcctctttcggcgtgatgtgttctgagttttaaagctggggaagagactcaaatcttcaagagctcttccaactttgagattctctgttggtttcaggactatgggaggaagcgcttgtggtccgtgtctgttcccgggatttctgtttcttggtttgtatctctgctacaggtccaaggagctggggcaataccttgagtctgggttattcgtccccagggacctgggggagccccaccgcctccgccccaaggttcagggaaaggggagagcaatgtgtggggttggttctctctagtggtcagtgttagcactgcatccagctgactcaggtgggcccaggagtcatcagcaaaagtggaattcaggactcaatggtgctcagaacccccacaatctattggctgtgcttggccccttttcccaacacacacattctgtctggtgggtggaagttaaacacgcggggaggaggaaaggaataggatagagagtggaatggggtcggtaggggtctcaaggactggctatcctgacagccttccccgcgttcaggttgaccaacatggcctgcagccagagggcacccacctgacccttaaagagaggacaagttgggtggagtctgtggctgacactctgtgcacaatccttacaacactggtgatggtgagaagggaaagacgacaagccagggggcatgatcccagcatgtgtgggaggagcttctaaattatccactagcacaagcccgtcagtggccccatgcataaatgtacacagaaacaggtggggtcaagcagggagagagaactggccagggtataaaaagggcccacaagagaccggctctaggatcccaaggcccaactccccgaaccactcagggtcctgtggacagctcacctagtggcaatggctccaggtaagcgcccctaaaatccctttgggcacaacgtgtcctgaggggagaggcagcgccctgtagatgggacgggggcactaaccctcaggtttggggcttatgaatgtgagtatcgccatctaaggccagatatttggccaatctctgaatgttcctggtctctggagggatggagagagagaaaaaaaacaaacagctcctggagcagggagagcgctggcctcttcctctccggctccctccattgccctccggtttctccccaggctcccggacgtccctgctcctggcttttgccctgctctgcctgccctggcttcaagaggctggtgccgtccaaaccgttccgttatccaggctttttgaccacgctatgctccaagcccatcgcgcgcaccagctggccattgacacctaccaggagtttgtaagttcttggggaatgggtgcgggtcaggggtggcaagaaggggtgactttcccccactgggaagtaatgggaggagactaaggagctcagggttgttttctgaagcgaaaatgcaggcagatgagcataggctgagccaggttcccagaaaagcaacaatgggagctggtctccagcatagaaaccagcagtccttcttggtggggggtccttctcctaggaagaaacctatatcccaaaggaccagaagtattcattcctgcatgactcccagacctccttctgcttctcagactctattccgacaccctccaacatggaggaaacgcaacagaaatccgtgagtggatgccgtctccctaggcggggatgggggagacctgtggtcagggctcccgggcagcacagccactgccggtccttcccctgcagaatctagagctgctccgcatctccctgctgctcatcgagtcgtggctggagcccgtgcggttcctcaggagtatgttcgccaacaacctggtgtatgacacctcggacagcgatgactatcacctcctaaaggacctagaggaaggcatccaaacgctgatgggggtgagggtggcgccaggggtcaccaatcctggaaccccactggcttcgagggctgggggagagaaatactgctgccctctttttagcagtaaggcgctgacccaagagaactcaccttattcttcatttcgcctggtgaatcctccaggcctttctctacaccctgaaggggagggaggaaaatggataaatgagagagggagggaacagtgcccaagcgcttggcctctccttctcttccttcactttgcagaggctggaagacggcagccgccggactgggcagatcctcaagcagacctacagcaagtttgacacaaactcgcacaaccatgacgcactgctcaagaactacgggctgctctactgcttcaggaaggacatggacaaggtcgagacattcctgcgcatggtgcagtgccgctctgtggagggcagctgtggcttctaggtgcccgagtagcatcctgtgacccctccccagtgcctctcctggccctgaaggtgccactccagtgcccaccagccttgtcctaataaaattaagttgtatcatttcatctgactaggtgtcattctataatattatggggtggaaggtggtggtatggagcaaggggtaggtggaaagaagacctggagggccttcaaggtctattgggaactaggccactgaaatataagaggtttggctgttcctgggccagaaaaaagctgacacatcactgctgtctattactcactaaggccattccaccagctcagtggtcccagcttcgggttcacacgtcattggtcatctcagagatgacttgaaggcatttcttcctcccccaccatcaccagcaacaccaaacctagccccccaggagcgggaagaaatgaaaacaagatgggctattaagtgcagaggcaaaaaagtccccaacaggtgaggaaacaatggcatagaattacttgtgttcggaagaattttaagatgagtattccttaagcccaactactctcgggaaatgagaacaatgcaaaaatgagtttgagacatacagaaccagagcatttggaatctgaattagggcaagggaagtggaagagagattttatttggggttgtaaatgcagtgccaacaggttccaggtagataacaatgtaagcaatgagggctggatgggagggataaatcccagatgacactcgcttccttcgggggatgcaacacagaggggtgggaaccagcacaatctgcagaactcaggcccctgctgaggtgggacccacccagcctgtcaccatcaggactgcagggacacggcttccagaccttctgaccttttgagacagccaggacatccagacttttacaggaattctaacatttaaacactggcaacacatattgaaaatcttttaagggcaaaaattaacccaaacacacatggtctccaagctgtctgtgagcaattttgttctaagagatgttgattggggtaacttggtgtaagggaaagaatcagaaagatttgggctgtatgtaatttagtgcccccgaataaattacttgaccaagctgagataataatatattgctttacaaggattatgtgaggactaaatgcaatggtatttttgatatattatagtactcaagaaattctagctatttctgcattgaatttttggatgttttgtgttttctgatggagtgtctaaatacctgtagtgaaattatattgttttcctaatgacaattaggaaataataaacatctcagatgtttattatttccaaataagcactaaagagcggtggttagttaagagtttgctctcccaagcaccttggctaagtgactggtgacctataaatcgatgctaagatgctcacaggaactctagtatccaaaaatgatttcataaagtcaggaattgttttgcaatgcaaataatcaaccccccaattaatcttctttagaagttcgattcttaaatgctataatgaattttcttgataatgagacccacttgtattcatttttggctattttaccattaataactcagtccttgggaagtggttgaaagttgaactaaacagaattctggagctgctgcatttctcagctcagaagccattcctgcatcttgcattgttcttctactatcgggctttaaaattatggcattttggagttagaagggcctcataagtcagcctagtttcttctactttgggaatcttatcctacaacatccattacagtcagtattccatttacgagtgtgtagcactagaaccaagggaatcactttcacaaggctcctcattctattaaaccactctcattgcaaaaaactatttcttgcacgaagctggaatcaatattcctgcaatgtccttcatttggccttaaaattatttagaaatctcagtctttagaagttgatggaatgagcacaattataattatctctcggcttgcgtgttttaaaaggaaatgtgagccatcttaataagtatttgttgaatgcacgtgacagtggaatgacaatgtccagcgcctacttgggtggctaagagggttctaaagtggggtggtcataacatgtaactgaactgcaggcggagccacactccagagactgtccacccagctcccctcgggtataggaaactccactcaaccactgctggttgagaattagaaagatactaccaactttgcacattttaaaatataaaaagaccttaaagaccatctactttaaactctttgatttacccactgttagtctacatttcagctcatcaacttggtgtggacggcaattccgctgcaaatttgagatgcctagggtgttttctaaacgatgcattcgtgagccctcactccctgagattctgatataattagactggaatgtggtccaggcaagagtaatttgaaaactttcccaggtgattctaacatgtaaacaaggttgagaaccaccgtgttagggaccgcaaagatgagacccatgtgttcacagctgttgtactggtggaacagggaaaacagagaaaaaggagatgagaaaaaggagaaaaaggagatggcagttgtggtgccacctgctcctaattccaaccagtcatctaaagtgtttatcgtgagccagtcacaaaaagacaaatactctccgattccagtcagatgaggtactcagagcagtcaaattcatagagacaa

SEQ ID NO: 45 - DNA, 2437 bp, Homo sapiens
agacactggccgcgggccaccatctggacgcgatcccccgctagggcctccctggtctgggccaaagttggtggccaccttcgcgcgggctgcgccctccttctcttccctgccctcctcccccggggcccgcgcccgctgcctccagcacgcgcgtcggcaggctcggcaagcgaagaggagcggctcgccccagggcgcccctcgcccagcctgccggccaggcgagcgcgacgagagtctccccgcaccccttcctctcccgggggccgagagggttgggctccgccccggcgccgcagctcccgactccccgccgctcgggctgccgccgctgccccgcgcccggcgctcggggcagccgggggcgcaggcggagagcgcagggcggggagaggcgtggggagcagagcggcgctgaggggagggcagaggaggagagagcctggcagcggaggagcagaggcgggcgccgcaccgccccgcacgctcgctcgctcgggagagtcgcgggcggccgcttgggcgcacttgccgggtcaccttgtcccggaggagaaatggcttccctgaggcaagtgtaacctacattcccagcccaccagcctgacgcccagccagggagagagtaccatggatggcatcattgaacagaagagcatgctggtgcacagtaaaatcagtgatgctggcaagaggaatggtttaattaacaccagaaacttgatggccgagagcagagatggtctggtgtctgtttacccagcgccccagtaccagagccaccgggtgggggccagcacagtgccggccagcctggacagcagcaggagtgagccgatgcagcagctgctggaccccaacaccctgcagcagtcagtggagtcccgctaccggcccaacatcatcctctattcagagggcgtgctgcgctcctggggggacggtgtggccgccgactgctgcgagaccaccttcatcgaggaccggtcgcccaccaaagacagcctcgagtacccggatgggaagttcattgacctctcagctgatgacataaaaatccacaccctgtcctacgatgtggaggaggaggaggagttccaggagctggagagcgactactcaagcgacacagagagtgaggacaatttcctcatgatgcccccgcgggaccacctgggcctcagtgtcttctccatgctctgctgcttctggcctctgggcatcgcagccttctacttgtcccatgagaccaacaaagccgtggccaagggggacttgcaccaggccagcaccagctcccggcgggccctattcctggcagtgctgtccatcaccattgggactggcgtctatgtgggcgtggccgtggccctcatcgcctacctctccaagaacaaccacctgtgagcttcctgcgaatggagggggagcacccggggccaggtctgtgtggacgtggaggaagcaggcataccgcatgatgctgtacagtacaaatgattgccaaatgatgccacgaagccctgggatttcctacccatggatttattttgtttttatcctttaatttcatgttcacagcactgtgtagagcaccagacagacgggcactgctaatccttccaaaggaaagctccaaagatcccagcccgcaaggctgtctctggatggattctggtggatgaatggcaacgcggctctctgcagcctgccagtgcccagagtgccaccgcattagcaatatacaaacagtccaaaaaagtgtttattttttatggaatacggtgcaataggcagaggacaagggacacatcactcttctgtctgtggccctgctggagtcctttgtgccccccggagtccacacgccttccctgcaagacgagaatggggctgggaagaaagaggcaacaccacggctggcaggagccccgctgcactgctctgcagacccattggcctgaccctgagaagcagagccagcaaagcccgggacctgcccctctttctttcccttcacaccaccccagcctcaggatgtcaagccacctccggaacgtgtctacactccacagctaccccgcagcaatacgcactcttgggacctcgctgatctaggatggggaggcaggccaccgcccctcccaagactcctcaagaaagagccccgcggttgctccggaaactcgaggcactgcagctatgggcactgcctcagcctaaagacacaggggcgcctcccaatcaccgcgctggcggatgctcaccccgtcataagcagaaactagtgatcctggaaatgagatgggccttactctgtcgactaaatgaatagctattttcttgtcattttttaaagtgcaactcttgcttcatgctgcttaagttaccagatgaatgctgagaaataagtaatcacagacattttaatacc

SEQ ID NO: 46 - DNA, 2202 bp, Homo sapiens
gcgcctctccggagatggtctgaggtgggagaagagctgaagagacctggagccgacagacgggtgaaggccatgccgcctcctgggaaagttccccgaaaggagaatctgtggctacagtgtgagtgggggtcctgctcctttgtgtgctcaaccatggaaaagttctttgagcatgtcactcagcacctgcagcagcacctgcatggctctggggaggaggaggaagaggaagaggaggatgacccacttgaggaagaattctcctgcttgtggcaggaatgtggcttttgttctctggacagttctgctgacctcatccgccatgtctacttccactgctaccacaccaagctgaaacagtgggggctgcaggccttgcaaagccaggctgaccttggcccctgcatcctggacttccagagccggaacgtcatccctgatatccctgaccacttcctgtgtctgtgggagcactgtgagaattccttcgacaatcctgagtggttttatcggcatgtggaagcacacagtctgtgctgtgaatacgaagcagtcggcaaggacaacccggtggtgctgtgtggctggaaaggctgtacctgcaccttcaaggaccgcagtaaacttcgagagcacctccgcagccatacccaggagaaagtggtagcctgccccacctgtgggggcatgtttgccaacaataccaagttcttagatcacatccgtcgccagacctcattggatcagcagcacttccagtgttctcactgttccaagagatttgccacagagcggctattgcgggaccacatgcgcaaccatgtgaatcactataagtgccctctgtgtgacatgacctgcccgctgccttcctccctccgcaaccacatgcgctttcgtcacagtgaggaccggccctttaaatgtgactgttgtgactacagctgcaagaatcttattgacctccagaagcacctggatacccacagcgaggagccagcctacaggtgtgattttgagaactgcaccttcagtgcccgatccctctgctctatcaagtcccattaccgcaaagtacatgaaggagactctgagccaaggtacaaatgtcatgtgtgtgacaaatgcttcacacggggcaacaacctcaccgtgcaccttcgcaagaagcaccagttcaagtggccctcagggcatccccgttttcggtacaaggaacatgaagatggctatatgcggctgcagctggttcgctacgagagtgtagagctgacacagcaactgctgcggcaaccacaagagggatcgggcctgggaacgtcgctgaacgagagcagcctgcagggcattattctagaaacagtgccaggggagccaggacgtaaggaagaggaagaggagggcaagggtagcgaagggacagccctctcagcctctcaggacaaccccagttctgtcatccacgtggtgaatcagaccaatgcccaaggccagcaagagattgtctactatgtgctgtctgaagccccaggggagcctcccccagcccctgagccaccttcagggggcatcatggaaaagcttcaaggaatagctgaggagccagagatccagatggtttgaaggccgcagagccagaccatttcttccccaggtcctgaagtttgagccaggcaagtggcagtgcccctagtgggcagccgttgccaatggatgcctttaggagtggtgccgagagcagtgtggtccactctggcctgggtttgcatcattctgcagactctaaagacttcccttttctgccagactacattttgtggggagcctgaggactctggattctttgaggggatcctggatgtgtgtgttcttgttaaagaggctgttatcaggcttaaccataaccctcaagatctgcttgacagtgattaaatccttagctcacatccattcccatctttcgggctccttaggcccaaggatggcatgtgactggtccctgcaagggtcctttctttgtcaccagccaaggcattgataaccaagtagccattttcctcttaaggtttcctctacaaccccaaggactttcatgattatcctcagggacaggattggaggcattgagcgtgtttattaacaaattgtttttggtaataaaataaatgcttggactcttaaaaaaaaaaaaaaaaaaaa

SEQ ID NO: 47 - DNA, 437 bp, Homo sapiens
  misc_feature (281)..(281): n is a, c, g or t.
  misc_feature (398)..(398): n is a, c, g or t.
  misc_feature (433)..(433): n is a, c, g or t.
gaaactcaaagaattcctagagtatccagagaaaaaggcttgaagactgtgcagccaggaacaacactgtaaattccactgcaggattcattcattgaggacaccatagcagccatactgcacctggacactgcagctcacaccatctgcaccatcagcaagtgttcttggatgccgatgctagaaccactggccctgctgcctctgggaactggatgtagctgtcattgtgtcttaaatctgccagaatggatttggcatgttcctttctttttgtcacnagcagattcaaagaccatctgattggtggaatcttgatcacgtgtccatatctagtggcaagggagactgggaagtccagtgtcaggaatttcagcttctacaggaggagcagagcnctatctcaaaagaggatttccttaaccagaagctnagtt

SEQ ID NO: 48 - DNA, 1963 bp, Homo sapiens
cgaacacctccaacatgaagcttcttcatgttttcctgttatttctgtgcttccacttaaggttttgcaaggtcacttatacatctcaagaggatctggtggagaaaaagtgcttagcaaaaaaatatactcacctctcctgcgataaagtcttctgccagccatggcagagatgcattgagggcacctgtgtttgtaaactaccgtatcagtgcccaaagaatggcactgcagtgtgtgcaactaacaggagaagcttcccaacatactgtcaacaaaagagtttggaatgtcttcatccagggacaaagtttttaaataacggaacatgcacagccgaaggaaagtttagtgtttccttgaagcatggaaatacagattcagagggaatagttgaagtaaaacttgtggaccaagataagacaatgttcatatgcaaaagcagctggagcatgagggaagccaacgtggcctgccttgaccttgggtttcaacaaggtgctgatactcaaagaaggtttaagttgtctgatctctctataaattccactgaatgtctacatgtgcattgccgaggattagagaccagtttggctgaatgtacttttactaagagaagaactatgggttaccaggatttcgctgatgtggtttgttatacacagaaagcagattctccaatggatgacttctttcagtgtgtgaatgggaaatacatttctcagatgaaagcctgtgatggtatcaatgattgtggagaccaaagtgatgaactgtgttgtaaagcatgccaaggcaaaggcttccattgcaaatcgggtgtttgcattccaagccagtatcaatgcaatggtgaggtggactgcattacaggggaagatgaagttggctgtgcaggctttgcatctgtggctcaagaagaaacagaaattttgactgctgacatggatgcagaaagaagacggataaaatcattattacctaaactatcttgtggagttaaaaacagaatgcacattcgaaggaaacgaattgtgggaggaaagcgagcacaactgggagacctcccatggcaggtggcaattaaggatgccagtggaatcacctgtgggggaatttatattggtggctgttggattctgactgctgcacattgtctcagagccagtaaaactcatcgttaccaaatatggacaacagtagtagactggatacaccccgaccttaaacgtatagtaattgaatacgtggatagaattattttccatgaaaactacaatgcaggcacttaccaaaatgacatcgctttgattgaaatgaaaaaagacggaaacaaaaaagattgtgagctgcctcgttccatccctgcctgtgtcccctggtctccttacctattccaacctaatgatacatgcatcgtttctggctggggacgagaaaaagataacgaaagagtcttttcacttcagtggggtgaagttaaactaataagcaactgctctaagttttacggaaatcgtttctatgaaaaagaaatggaatgtgcaggtacatatgatggttccatcgatgcctgtaaaggggactctggaggccccttagtctgtatggatgccaacaatgtgacttatgtctggggtgttgtgagttggggggaaaactgtggaaaaccagagttcccaggtttttacaccaaagtggccaattattttgactggattagctaccatgtaggaaggccttttatttctcagtacaatgtataaaattgtgatctctctcttcattctattctttttctctcaagagttccatttaatggaaataaaacggtataattaataattctctaggggggaaaaatgaagcaaatctcattggatatttttaaaggtctccacagagtttatgccatattggaattttgttgtataattctcaaataaatattttggtgaagcat

SEQ ID NO: 49 - DNA, 3263 bp, Homo sapiens
ggtagagtgattttccctcggtgactcaactgggacgtagcaggtcgggcagtcaagccaggtgaccccatgagctgtcgctgcatctttctcatgaagcacggggaacgggtcggatggcccgtgggagtcagcatgccgcgtggctgggccgcccccttgctcctgctgctgctccagggaggctggggctgccccgacctcgtctgctacaccgattacctccagacggtcatctgcatcctggaaatgtggaacctccaccccagcacgctcacccttacctggcaagaccagtatgaagagctgaaggacgaggccacctcctgcagcctccacaggtcggcccacaatgccacgcatgccacctacacctgccacatggatgtattccacttcatggccgacgacattttcagtgtcaacatcacagaccagtctggcaactactcccaggagtgtggcagctttctcctggctgagagcatcaagccggctccccctttcaacgtgactgtgaccttctcaggacagtataatatctcctggcgctcagattacgaagaccctgccttctacatgctgaagggcaagcttcagtatgagctgcagtacaggaaccggggagacccctgggctgtgagtccgaggagaaagctgatctcagtggactcaagaagtgtctccctcctccccctggagttccgcaaagactcgagctatgagctgcaggtgcgggcagggcccatgcctggctcctcctaccaggggacctggagtgaatggagtgacccggtcatctttcagacccagtcagaggagttaaaggaaggctggaaccctcacctgctgcttctcctcctgcttgtcatagtcttcattcctgccttctggagcctgaagacccatccattgtggaggctatggaagaagatatgggccgtccccagccctgagcggttcttcatgcccctgtacaagggctgcagcggagacttcaagaaatgggtgggtgcacccttcactggctccagcctggagctgggaccctggagcccagaggtgccctccaccctggaggtgtacagctgccacccaccacggagcccggccaagaggctgcagctcacggagctacaagaaccagcagagctggtggagtctgacggtgtgcccaagcccagcttctggccgacagcccagaactcggggggctcagcttacagtgaggagagggatcggccatacggcctggtgtccattgacacagtgactgtgctagatgcagaggggccatgcacctggccctgcagctgtgaggatgacggctacccagccctggacctggatgctggcctggagcccagcccaggcctagaggacccactcttggatgcagggaccacagtcctgtcctgtggctgtgtctcagctggcagccctgggctaggagggcccctgggaagcctcctggacagactaaagccaccccttgcagatggggaggactgggctgggggactgccctggggtggccggtcacctggaggggtctcagagagtgaggcgggctcacccctggccggcctggatatggacacgtttgacagtggctttgtgggctctgactgcagcagccctgtggagtgtgacttcaccagccccggggacgaaggacccccccggagctacctccgccagtgggtggtcattcctccgccactttcgagccctggaccccaggccagctaatgaggctgactggatgtccagagctggccaggccactgggccctgagccagagacaaggtcacctgggctgtgatgtgaagacacctgcagcctttggtctcctggatgggcctttgagcctgatgtttacagtgtctgtgtgtgtgtgtgcatatgtgtgtgtgtgcatatgcatgtgtgtgtgtgtgtgtgtcttaggtgcgcagtggcatgtccacgtgtgtgtgtgattgcacgtgcctgtgggcctgggataatgcccatggtactccatgcattcacctgccctgtgcatgtctggactcacggagctcacccatgtgcacaagtgtgcacagtaaacgtgtttgtggtcaacagatgacaacagccgtcctccctcctagggtcttgtgttgcaagttggtccacagcatctccggggctttgtgggatcagggcattgcctgtgactgaggcggagcccagccctccagcgtctgcctccaggagctgcaagaagtccatattgttccttatcacctgccaacaggaagcgaaaggggatggagtgagcccatggtgacctcgggaatggcaattttttgggcggcccctggacgaaggtctgaatcccgactctgataccttctggctgtgctacctgagccaagtcgcctcccctctctgggctagagtttccttatccagacagtggggaaggcatgacacacctgggggaaattggcgatgtcacccgtgtacggtacgcagcccagagcagaccctcaataaacgtcagcttccttccttctgcggccagagccgaggcgggcgggggtgagaacatcaatcgtcagcgacagcctgggcacccgcggggccgtcccgcctgcagagggccactcgggggggtttccaggcttaaaatcagtccgtttcgtctcttggaaacagctccccaccaaccaagatttctttttctaacttctgctactaagtttttaaaaattccctttatgcacccaagagatatttattaaacaccaattacgtagcaggccatggctcatgggacccaccccccgtggcactcatggagggggctgcaggttggaactatgcagtgtgctccggccacacatcctgctgggccccctaccctgccccaattcaatcctgccaataaatcctgtcttatttgttcatcctggagaattgaagggaggtcaagttgtttgtcaatgatttgtcagagaacctgttgaaatgtgaattaagaagctaagaaaatatttcttagcaacattttctttttcttttttttttttttcttttgagacagagtctcactctcgtcgcccaggctggaatgcagtggtgcgatctcggctctctgcaacctctgtctcccgggttcaagcgatttcctgcgtcagccccagagtagctggaattacaggcacacaccaccacgcctggctaatttttgtatttttagtagagctggggccaccctggcccggccccg

SEQ ID NO: 50 - DNA, 4045 bp, Homo sapiens
gcagccagagctcagcagggccctggagagatggccacggtcccagcaccggggaggactggagagcgcgcgctgccaccgccccatgtctcagccagggcttccttcctcggctccaccctgtggatgtaatggcggcccctgctctgtcctggcgtctgcccctcctcatcctcctcctgcccctggctacctcttgggcatctgcagcggtgaatggcacttcccagttcacatgcttctacaactcgagagccaacatctcctgtgtctggagccaagatggggctctgcaggacacttcctgccaagtccatgcctggccggacagacggcggtggaaccaaacctgtgagctgctccccgtgagtcaagcatcctgggcctgcaacctgatcctcggagccccagattctcagaaactgaccacagttgacatcgtcaccctgagggtgctgtgccgtgagggggtgcgatggagggtgatggccatccaggacttcaagccctttgagaaccttcgcctgatggcccccatctccctccaagttgtccacgtggagacccacagatgcaacataagctgggaaatctcccaagcctcccactactttgaaagacacctggagttcgaggcccggacgctgtccccaggccacacctgggaggaggcccccctgctgactctcaagcagaagcaggaatggatctgcctggagacgctcaccccagacacccagtatgagtttcaggtgcgggtcaagcctctgcaaggcgagttcacgacctggagcccctggagccagcccctggccttcaggacaaagcctgcagcccttgggaaggacaccattccgtggctcggccacctcctcgtgggcctcagcggggcttttggcttcatcatcttagtgtacttgctgatcaactgcaggaacaccgggccatggctgaagaaggtcctgaagtgtaacaccccagacccctcgaagttcttttcccagctgagctcagagcatggaggagacgtccagaagtggctctcttcgcccttcccctcatcgtccttcagccctggcggcctggcacctgagatctcgccactagaagtgctggagagggacaaggtgacgcagctgctcctgcagcaggacaaggtgcctgagcccgcatccttaagcagcaaccactcgctgaccagctgcttcaccaaccagggttacttcttcttccacctcccggatgccttggagatagaggcctgccaggtgtactttacttacgacccctactcagaggaagaccctgatgagggtgtggccggggcacccacagggtcttccccccaacccctgcagcctctgtcaggggaggacgacgcctactgcaccttcccctccagggatgacctgctgctcttctcccccagtctcctcggtggccccagccccccaagcactgcccctgggggcagtggggccggtgaagagaggatgcccccttctttgcaagaaagagtccccagagactgggacccccagcccctggggcctcccaccccaggagtcccagacctggtggattttcagccaccccctgagctggtgctgcgagaggctggggaggaggtccctgacgctggccccagggagggagtcagtttcccctggtccaggcctcctgggcagggggagttcagggcccttaatgctcgcctgcccctgaacactgatgcctacttgtccctccaagaactccagggtcaggacccaactcacttggtgtagacagatggccagggtgggaggcaggcagctgcctgctctgcgccgagcctcagaaggaccctgttgagggtcctcagtccactgctgaggacactcagtgtccagttgcagctggacttctccacccggatggcccccacccagtcctgcacacttggtccatccatttccaaacctccactgctgctcccgggtcctgctgcccgagccaggaactgtgtgtgttgcaggggggcagtaactccccaactccctcgttaatcacaggatcccacgaatttaggctcagaagcatcgctcctctccagccctgcagctattcaccaatatcagtcctcgcggctctccagggctccctgccctgacctcttccctgggttttctgccccagcctcctccttccctcccctccccgtccacagggcagcctgagcgtgctttccaaaacccaaatatggccacgctccccctcggttcaaaaccttgcacaggtcccactgccctcagccccacttctcagcctggtacttgtacctccggtgtcgtgtggggacatccccttctgcaatcctccctaccgtcctcctgagccactcagagctccctcacaccccctctgttgcacatgctattccctggggctgctgtgcgctccccctcatctaggtgacaaacttccctgactcttcaagtgccggttttgcttctcctggagggaagcactgcctcccttaatctgccagaaacttctagcgtcagtgctggagggagaagctgtcagggacccagggcgcctggagaaagaggccctgttactattcctttgggatctctgaggcctcagagtgcttggctgctgtatctttaatgctggggcccaagtaagggcacagatccccccacaaagtggatgcctgctgcatcttcccacagtggcttcacagacccacaagagaagctgatggggagtaaaccctggagtccgaggcccaggcagcagccccgcctagtggtgggccctgatgctgccaggcctgggacctcccactgccccctccactggaggggtctcctctgcagctcagggactggcacactggcctccagaagggcagctccacagggcagggcctcattatttttcactgccccagacacagtgcccaacaccccgtcgtataccctggatgaacgaattaattacctggcaccacctcgtctgggctccctgcgcctgacattcacacagagaggcagagtcccgtgcccattaggtctggcatgccccctcctgcaaggggctcaaccccctaccccgacccctccacgtatctttcctaggcagatcacgttgcaatggctcaaacaacattccaccccagcaggacagtgaccccagtcccagctaactctgacctgggagccctcaggcacctgcacttacaggccttgctcacagctgattgggcacctgaccacacgcccccacaggctctgaccagcagcctatgagggggtttggcaccaagctctgtccaatcaggtaggctgggcctgaactagccaatcagatcaactctgtcttgggcgtttgaactcagggagggaggcccttgggagcaggtgcttgtggacaaggctccacaagcgttgagccttggaaaggtagacaagcgttgagccactaagcagaggaccttgggttcccaatacaaaaatacctactgctgagagggctgctgaccatttggtcaggattcctgttgcctttatatccaaaataaactcccctttcttgaggttgtctgagtcttgggtctatgccttgaaaaaagctgaattattggacagtctcacctcctgccatagggtcctgaatgtttcagaccacaaggggctccacacctttgctgtgtgttctggggcaacctactaatcctctctgcaagtcggtctccttatccccccaaatggaaattgtatttgccttctccactttgggaggctcccacttcttgggagggttacattttttaagtcttaatcatttgtgacatatgtatctatacatccgtatcttttaatgatccgtgtgtaccatctttgtgattatttccttaatattttttctttaagtcagttcattttcgttgaaatacatttatttaaagaaaaatctttgttactctgtaaatgaaaaaacccattttcgctataaataaaaggtaactgtacaaaataagtacaatgcaacaaaa

SEQ ID NO: 51 - DNA, 2968 bp, Homo sapiens
cgccgcgccgcttcccccacctcgcaccagacctctgaaattgccctcggagactcggcctctcctataaggacgatcgtcctctcagctggagaacaaggccatgcctcagctcctacgccaggcggaagcgggagaggaaggccgacccccaagagcgccccttcagggggtccatccggccttgatctcagatgggggggtgtttgcggagggcggggcatcgcctcaacagctgggggctgcatcatggcaggaacgagtttccctgagccacggagctgcaggtcgcctcctctactaccctgctacccggttacctcttcgcctcttggtcgtcgagcagctccggctcggtcgccgccattaccacatcgcactccgcggcagccgccatcttaccgccgggaccagagagctgggtgggaggccggcggtgaagagcacttccggttggagcatagagcagctccgcggcgcctcgcccagaagggctccctcgggctcgtctaccagagagaggctccgcttggggccagagcggcctcccgcccccggatgtccacggtggtctccgcgccggggcgggagcccaggggctgtgccggttgaaaactaagcatggggaagagctgcaaggtggtcgtgtgtggccaggcgtctgtgggcaaaacttcaatcctggagcagcttctgtatgggaaccatgtagtgggttcggagatgatcgagacgcaggaggacatctacgtgggctccattgagacagaccggggggtgcgagagcaggtgcgtttctatgacacccgggggctccgagatggggccgaactgccccgacactgcttctcttgcactgatggctacgtcctggtctatagcacagatagcagagagtcttttcagcgtgtggagctgctcaagaaggagattgacaaatccaaggacaagaaggaggtcaccatcgtggtccttggcaacaagtgtgacttacaggagcagcggcgtgtagacccagatgtggctcagcactgggccaagtcagagaaggtgaagctgtgggaggtgtcagtggcggaccggcgctccctcctggagccctttgtctacttggccagcaagatgacgcaaccccagagcaagtctgccttccccctcagccggaagaacaagggcagcggctccttggatggctgaagagctgccgttcctctttcacgatcccagccccatttcagtgtctggggctctggtagatgtgttgagggcaaagtagaggacaagctgtctttcccagtcagccagggagctccccgccaggccacgccccagccactttgctccctctcacctctgggaagtgcaaatactcttggttgacatccccttcctcagccctcccagcctactccccatcccagcttttagaggatctgctccactgtctcctggggcagttgtgggtcactgtcccttccagctgccccagacaggaagcagagtcaccacgcagcagtgtcccttcttgggtctgagttcctattataggtaggggccccaccctctgggcttcccatcagcgacacacacacacttatggcaccagcctggactccagaaaaagggtgtccaggtattgtgtgtatgcatttagttgtgcacacacaaatatgctcctatactggcattaggcgtctcctcatccctcaccctgacctttctcctgtccttttcttggctggaagaagttggcctcctgggagtgtagttttctgttttaaatcccccacccctggctgggctcagtggctcacccctgtaatcccagcactttgggaggccaaggcgggtcgattacttgaggtcaggagttcacgaccagcctggccaacattgtgaaaccccatctctgccaaaaatacaaaagttagccgggcgtagtggcacatgcctgtaatcccagctacccggggaggctgaggcaggagaattgcttgaactcagaaggcggaggctgcagtgagccgagatcgtgccactgcactccagcctggtcaacagagcaagactccatctcgaaaaaaaaaaaaaaaattccccacccctaccaattgttttacttcctcttcctgctcagggagcagatgggcctcactggttgagatggaatagaataactgggctatgagtcaccagcccactttgtgacccagcaagacctttcccctctctgggcatcagtttctcatctgtaagatgaccagagttgcttagatgatctcctagatcctttccagttctcttgatttcgtaaagccaatggcttctccctctttaaggtgctatgccaaccagccctggaggctgggatctgccgctccctccagccaccagggggcaggagtgcactacctgctgtcagtcaccagagtggccgctcagtgcccagcccgccagcctcgctcttggaggctgctctttatcctgcctgtggttttcagctcagagctggacttctatttataagttacctgtatttatatttatatgcccgctctcatggtgaaggctggacaaggtgctcctctggcccctccttcttacctcagatgcctgaacagaacaaggcaaacccgtagcagcctctcaggagctgacaggtcctctttcggggctcaggagggtgggcacacacccagcggcctgcagagtaagcttattacccacaactgtgcccgctttgtgcttctaaggtgcacacctagcctaggtgagacactgcagccaggcaaccaccgacacacgccccttctcaaagccagaggtgagtggggcaggtgcccggggctgggtgagtggaattaggacacacacaggcttgggcttcaagttcatttattgatgcattggttggacacaataaaaccacaattgttatcaaaaaaaaaaaaaaaaaaaaaaaaaaaaa

SEQ ID NO: 52 - DNA, 1759 bp, Homo sapiens
cccctgcctctcggactcgggctgcggcgtcagccttcttcgggcctcggcagcggtagcggctcgctcgcctcagccccagcgcccctcggctaccctcggcccaggcccgcagcgccgcccgccctcggccgccccgacgccggcctgggccgcggccgcagccccgggctcgcgtaggcgccgaccgctcccggcccgccccctatgggccccggctagaggcgccgccgccgccggcccgcggagccccgatgctggcccggaggaagccggtgctgccggcgctcaccatcaaccctaccatcgccgagggcccatcccctaccagcgagggcgcctccgaggcaaacctggtggacctgcagaagaagctggaggagctggaacttgacgagcagcagaagaagcggctggaagcctttctcacccagaaagccaaggtcggcgaactcaaagacgatgacttcgaaaggatctcagagctgggcgcgggcaacggcggggtggtcaccaaagtccagcacagaccctcgggcctcatcatggccaggaagctgatccaccttgagatcaagccggccatccggaaccagatcatccgcgagctgcaggtcctgcacgaatgcaactcgccgtacatcgtgggcttctacggggccttctacagtgacggggagatcagcatttgcatggaacacatggacggcggctccctggaccaggtgctgaaagaggccaagaggattcccgaggagatcctggggaaagtcagcatcgcggttctccggggcttggcgtacctccgagagaagcaccagatcatgcaccgagatgtgaagccctccaacatcctcgtgaactctagaggggagatcaagctgtgtgacttcggggtgagcggccagctcatagactccatggccaactccttcgtgggcacgcgctcctacatggctccggagcggttgcagggcacacattactcggtgcagtcggacatctggagcatgggcctgtccctggtggagctggccgtcggaaggtaccccatccccccgcccgacgccaaagagctggaggccatctttggccggcccgtggtcgacggggaagaaggagagcctcacagcatctcgcctcggccgaggccccccgggcgccccgtcagcggtcacgggatggatagccggcctgccatggccatctttgaactcctggactatattgtgaacgagccacctcctaagctgcccaacggtgtgttcacccccgacttccaggagtttgtcaataaatgcctcatcaagaacccagcggagcgggcggacctgaagatgctcacaaaccacaccttcatcaagcggtccgaggtggaagaagtggattttgccggctggttgtgtaaaaccctgcggctgaaccagcccggcacacccacgcgcaccgccgtgtgacagtggccgggctccctgcgtcccgctggtgacctgcccaccgtccctgtccatgccccgcccttccagctgaggacaggctggcgcctccacccaccctcctgcctcacccctgcggagagcaccgtggcggggcgacagcgcatgcaggaacgggggtctcctctcctgcccgtcctggccggggtgcctctggggacgggcgacgctgctgtgtgtggtctcagaggctctgcttccttaggttacaaaacaaaacagggagagaaaaagcaaaaaaaaaaaaaaaaaaaaaaaaaaaa

SEQ ID NO: 53 - DNA, 372 bp, Homo sapiens
  misc_feature (290)..(290): n is a, c, g or t.
  misc_feature (309)..(309): n is a, c, g or t.
  misc_feature (326)..(326): n is a, c, g or t.
gagactcaatgtaaatgtttattgatagatgaatggataaagaaaatgtagtatacacatacaatgaaatattattcagacttatgaaagaaggaaatcctgccatttgtgaaatatggatgagtgtggaggataataggctaagtgaaattagccaaacacacaaggacaaatactacataataccacctatgtgatgaatctaaaatagtcaaactcatagcagcagagagtggaataagttgttgaagggaacatgatgaggtggaatccaagttattagaccaagnataccaattttcagttacntaagttggataagtccnagggatatatttggtaccgccttaggagcccatggggtaaataata

SEQ ID NO: 54 - DNA, 1694 bp, Homo sapiens
ggcggcggcagcggcggcgacggcgacatggagagcggggcctacggcgcggccaaggcgggcggctccttcgacctgcggcgcttcctgacgcagccgcaggtggtggcgcgcgccgtgtgcttggtcttcgccttgatcgtgttctcctgcatctatggtgagggctacagcaatgcccacgagtctaagcagatgtactgcgtgttcaaccgcaacgaggatgcctgccgctatggcagtgccatcggggtgctggccttcctggcctcggccttcttcttggtggtcgacgcgtatttcccccagatcagcaacgccactgaccgcaagtacctggtcattggtgacctgctcttctcagctctctggaccttcctgtggtttgttggtttctgcttcctcaccaaccagtgggcagtcaccaacccgaaggacgtgctggtgggggccgactctgtgagggcagccatcaccttcagcttcttttccatcttctcctggggtgtgctggcctccctggcctaccagcgctacaaggctggcgtggacgacttcatccagaattacgttgaccccactccggaccccaacactgcctacgcctcctacccaggtgcatctgtggacaactaccaacagccacccttcacccagaacgcggagaccaccgagggctaccagccgccccctgtgtactgagcggcggttagcgtgggaagggggacagagagggccctcccctctgccctggactttcccatgagcctcctggaactgccagcccctctctttcacctgttccatcctgtgcagctgacacacagctaaggagcctcatagcctggcgggggctggcagagccacaccccaagtgcctgtgcccagagggcttcagtcagccgctcactcctccagggcacttttaggaaagggtttttagctagtgtttttcctcgcttttaatgacctcagccccgcctgcagtggctagaagccagcaggtgcccatgtgctactgacaagtgcctcagcttccccccggcccgggtcaggccgtgggagccgctattatctgcgttctctgccaaagactcgtgggggccatcacacctgccctgtgcagcggagccggaccaggctcttgtgtcctcactcaggtttgcttcccctgtgcccactgctgtatgatctgggggccaccaccctgtgccggtggcctctgggctgcctcccgtggtgtgagggcggggctggtgctcatggcacttcctccttgctcccacccctggcagcagggaagggctttgcctgacaacacccagctttatgtaaatattctgcagttgttacttaggaagcctggggagggcaggggtgccccatggctcccagactctgtctgtgccgagtgtattataaaatcgtgggggagatgcccggcctgggatgctgtttggagacggaataaatgttttctcattcagtctccagtcattggttgagccacagcctaggggttggaggaagactccactctgggtacacccttaggggctggctttatggaacttgtagtttgaacaaggcagtggcaatccgccccctccagcctgcctggctggcccccttccctctgtctggggtcgcattccgcacaagcctttcatcaacatcttaaaatagtaactgtg

SEQ ID NO: 55 - DNA, 1263 bp, Homo sapiens
ttcctttctctctcagctctccgtctctctttctctctcagcctctttctttctccctgtctcccccactgtcagcacctcttctgtgtggtgagtggaccgcttaccccactaggtgaagatgtcagcccaggagagctgcctcagcctcatcaagtacttcctcttcgttttcaacctcttcttcttcgtcctcggcagcctgatcttctgcttcggcatctggatcctcattgacaagaccagcttcgtgtcctttgtgggcttggccttcgtgcctctgcagatctggtccaaagtcctggccatctcaggaatcttcaccatgggcatcgccctcctgggttgtgtgggggccctcaaggagctccgctgcctcctgggcctgtattttgggatgctgctgctcctgtttgccacacagatcaccctgggaatcctcatctccactcagcgggcccagctggagcgaagcttgcgggacgtcgtagagaaaaccatccaaaagtacggcaccaaccccgaggagaccgcggccgaggagagctgggactatgtgcagttccagctgcgctgctgcggctggcactacccgcaggactggttccaagtcctcatcctgagaggtaacgggtcggaggcgcaccgcgtgccctgctcctgctacaacttgtcggcgaccaacgactccacaatcctagataaggtgatcttgccccagctcagcaggcttggacacctggcgcggtccagacacagtgcagacatctgcgctgtccctgcagagagccacatctaccgcgagggctgcgcgcagggcctccagaagtggctgcacaacaaccttatttccatagtgggcatttgcctgggcgtcggcctactcgagctcgggttcatgacgctctcgatattcctgtgcagaaacctggaccacgtctacaaccggctcgctcgataccgttaggccccgccctccccaaagtcccgccccgcccccgtcacgtgcgctgggcacttccctgctgcctgtaaatatttgtttaatccccagttcgcctggagccctccgccttcacattcccctggggacccacgtggctgcgtgcccctgctgctgtcacctctcccacgggacctggggctttcgtccacagcttcctgtccccatctgtcggcctaccaccacccacaagattatttttcacccaaacctcaaataaatcccctgcgtttttggtaaaaaaaaaaaaaaaaaaaaaa

SEQ ID NO: 56 - DNA, 5379 bp, Homo sapiens
gcacttccttctcggctagattatctgaaactgttgtcggttcttgagatgatactaccaccgaatgtctgtgtttcattgtctagtccaacctgtattgtggatatctacaacgttccggcaatagttttgcaggtgcatcacatttttgtttttgttttgggaggaaaagggagggcacggcagccaggcttcatattcctacaagtgcatgcttcaagattactgtacttacagtgtttccaacatcttctcataaaaggggaaagcttcatagcctcaaccatgaaggaaaccagtcgcatagggcatggagctggagaactataaacagcccgtggtgctgagagaggacaactgccgaaggcgccggaggatgaagccgcgcagtgctgcggccagcctgtcctccatggagctcatccccatcgagttcgtgctgcccaccagccagcgcaaatgcaagagccccgaaacggcgctgctgcacgtggccggccacggcaacgtggagcagatgaaggcccaggtgtggctgcgagcgctggagaccagcgtggcggcggacttctaccaccggctgggaccgcatcacttcctcctgctctatcagaagaaggggcagtggtacgagatctacgacaagtaccaggtggtgcagactctggactgcctgcgctactggaaggccacgcaccggagcccgggccagatccacctggtgcagcggcacccgccctccgaggagtcccaagccttccagcggcagctcacggcgctgattggctatgacgtcactgacgtcagcaacgtgcacgacgatgagctggagttcacgcgccgtggcttggtgaccccgcgcatggcggaggtggccagccgcgaccccaagctctacgccatgcacccgtgggtgacgtccaagcccctcccggagtacctgtggaagaagattgccaacaactgcatcttcatcgtcattcaccgcagcaccaccagccagaccattaaggtctcacccgacgacacccccggcgccatcctgcagagcttcttcaccaagatggccaagaagaaatctctgatggatattcccgaaagccaaagcgaacaggattttgtgctgcgcgtctgtggccgggatgagtacctggtgggcgaaacgcccatcaaaaacttccagtgggtgaggcactgcctcaagaacggagaagagattcacgtggtactggacacgcctccagacccggccctagacgaggtgaggaaggaagagtggccgctggtggatgactgcacgggagtcaccggctaccatgagcagcttaccatccacggcaaggaccacgagagtgtgttcaccgtgtccctgtgggactgcgaccgcaagttcagggtcaagatcagaggcattgatatccccgtcctgcctcggaacaccgacctcacagtttttgtagaggcaaacatccagcatgggcaacaagtcctttgccaaaggagaaccagccccaaacccttcacagaggaggtgctgtggaatgtgtggcttgagttcagtatcaaaatcaaagacttgcccaaaggggctctactgaacctccagatctactgcggtaaagctccagcactgtccagcaaggcctctgcagagtcccccagttctgagtccaagggcaaagttcagcttctctattatgtgaacctgctgctgatagaccaccgtttcctcctgcgccgtggagaatacgtcctccacatgtggcagatatctgggaagggagaagaccaaggaagcttcaatgctgacaaactcacgtctgcaactaacccagacaaggagaactcaatgtccatctccattcttctggacaattactgccacccgatagccctgcctaagcatcagcccacccctgacccggaaggggaccgggttcgagcagaaatgcccaaccagcttcgcaagcaattggaggcgatcatagccactgatccacttaaccctctcacagcagaggacaaagaattgctctggcattttagatacgaaagccttaagcacccaaaagcatatcctaagctatttagttcagtgaaatggggacagcaagaaattgtggccaaaacataccaattgttggccagaagggaagtctgggatcaaagtgctttggatgttgggttaacaatgcagctcctggactgcaacttctcagatgaaaatgtaagagccattgcagttcagaaactggagagcttggaggacgatgatgttctgcattaccttctacaattggtccaggctgtgaaatttgaaccataccatgatagcgcccttgccagatttctgctgaagcgtggtttaagaaacaaaagaattggtcactttttgttttggttcttgagaagtgagatagcccagtccagacactatcagcagaggttcgctgtgattctggaagcctatctgaggggctgtggcacagccatgctgcacgactttacccaacaagtccaagtaatcgagatgttacaaaaagtcacccttgatattaaatcgctctctgctgaaaagtatgacgtcagttcccaagttatttcacaacttaaacaaaagcttgaaaacctgcagaattctcaactccccgaaagctttagagttccatatgatcctggactgaaagcaggagcgctggcaattgaaaaatgtaaagtaatggcctccaagaaaaaaccactatggcttgagtttaaatgtgccgatcctacagccctatcaaatgaaacaattggaattatctttaaacatggtgatgatctgcgccaagacatgcttattttacagattctacgaatcatggagtctatttgggagactgaatctttggatctatgcctcctgccatatggttgcatttcaactggtgacaaaataggaatgatcgagattgtgaaagacgccacgacaattgccaaaattcagcaaagcacagtgggcaacacgggagcatttaaagatgaagtcctgaatcactggctcaaagaaaaatcccctactgaagaaaagtttcaggcagcagtggagagatttgtttattcctgtgcaggctactgtgtggcaacctttgttcttggaataggcgacagacacaatgacaatattatgatcaccgagacaggaaacctatttcatattgacttcgggcacattcttgggaattacaaaagtttcctgggcattaataaagagagagtgccatttgtgctaacccctgacttcctctttgtgatgggaacttctggaaagaagacaagcccacacttccagaaatttcaggacatctgtgttaaggcttatctagcccttcgtcatcacacaaacctactgatcatcctgttctccatgatgctgatgacaggaatgccccagttaacaagcaaagaagacattgaatatatccgggatgccctcacagtggggaaaaatgaggaggatgctaaaaagtattttcttgatcagatcgaagtttgcagagacaaaggatggactgtgcagtttaattggtttctacatcttgttcttggcatcaaacaaggagagaaacattcagcctaatactttaggctagaatcaaaaacaagttagtgttctatggtttaaattagcatagcaatcatcgaacttggatttcaaatgcaatagacattgtgaaagctggcatttcagaagtatagctcttttcctacctgaactcttccctggagaaaagatgttggcattgctgattgtttggttaagcaatgtccagtgctaggattatttgcaggtttggttttttctcatttgtctgtggcattggagaatattctcggtttaaacagactaatgacttccttattgtccctgatattttgactatcttactattgagtgcttctggaaattctttggaataattgatgacatctattttcatctgggtttagtctcaattttggttatctttgtgttcctcaagctctttaaagaaaaagatgtaatcgttgtaacctttgtctcattccttaaatgatgcttccaaacatctccttagtgtctgcaggtgttagtggtgtgctaaaagcaaggaaagcgagttagtcttttcagtgtcttttgcaattcaattcttttgtcatgtataactgagacacacaaacacagcaggagaaatctaaaccgttgtgccttgaccttcctctgctggtcttgttccagggttatgaatatgaaaaaatagagatgagactttttgtgtcaactctgtccacaagagtgagttatctagtatgattagtatagctttctccagcatggcagcaggaagtaactacagggcctcttttatgcctgacatttcttcccttcctttttccctgcctccctttttcatcaattgcaatgctcccacaactctttacagacttgtgaaatcttcaagaacacctttactctataactcaaaaattagttgaaaaataattacttctcaaggattattagaatcttaggtacttatttgtaaagatgtttagtgacttttttttcaagtatcttattaaaggaggcattctagaaaatatgaattagtttccaaatgccttaattttaaactttggcctgaacagttttttctttttcttaatggaagaagatatttaatatcttaaaaatattccaagttaggaagaacactacttgccttatccatttcccatttaaaggacttttaaactttgacacatccttcagatttcctgaaaataattgaaatatcttactttaaaaatattttcatctctgaaatatctcgttatttattggaggtattgtttaaccttagagagaccattaaattatttataaaatattttgtaattacctgtagctaatacattacatagaaaaaaactatgttaacagtgtctctgtttaagtataatcagatataaatatatacttaattttttaattttaaaaatagatacctgtttgactttgaggtagtccagaccttttctttttttttttttttttaatgtgtgcaaaagcccaaaggttcctaagcctggctgcaaagaagaatcaacagggacactttttaaaaacactcttatcagcctgggcaacacagtgagactccatctcttaaaaaaaaaattagctgggtatagtggtatgtgcctgtagtcccaggtactcaggaggctgaggcaggaggattgcctgagcccaggaggtggaaactgcagagagtcatgatcatgtccttacactccagcctggataacagagcgagaccctgtctcaaaaaaataaaataaaaaataaaaaca

SEQ ID NO: 57 - DNA, 2921 bp, Homo sapiens
gtcgacccacgcgtccgtgccagtctccggggactttcccaggggtggggcggcgtgtccgggcccccggcacttcctcgtcctcggcccgggtgccctgcccccgtccaggagccctaggagtgctacggggggccggagccttgcccgggccgctgccccgtccctggattcggggctggacgcagcaagcggggcgctgtgtccccaagctccccgtcctcgcagcgggcacaggcaggggctgagctaccctcatggaagggagaggaccgtaccggatctacgaccctgggggcagcgtgccctcaggagaggcatccgcagcttttgagcgcctagtgaaggagaattcccggctgaaggaaaaaatgcaagggataaagatgttaggggagcttttggaagagtcccagatggaagcgaccaggctccggcagaaggcagaggagctagtgaaggacaacgagctgctcccaccaccttctccctccttgggctccttcgaccccctggctgagctcacaggaaaggactcaaatgtcacagcatctcccacagcccctgcatgccccagtgacaagccagcaccagtccagaagcctccatccagtggcacctcctctgaatttgaagtggtcactcctgaggagcagaattcaccagagagcagcagccatgccaatgcgatggcgctgggccccctgccccgtgaggacggcaacctgatgctgcacctgcagcgcctggagaccacgctgagtgtgtgtgccgaggagccggaccacggccagctcttcacccacctgggccgcatggccctggagttcaaccgactggcatccaaggtgcacaagaatgagcagcgcacctccattctgcagaccctgtgtgagcagcttcggaaggagaacgaggctctgaaggccaagttggataagggcctggaacagcgggatcaggctgccgagaggctgcgggaggaaaatttggagctcaagaagttgttgatgagcaatggcaacaaagagggtgcgtctgggcggccaggctcaccgaagatggaagggacaggcaagaaggcagtggctggacagcagcaggctagtgtgacggcaggtaaggtcccagaggtggtggccttgggcgcacccgagaagaaggtgaagatgctggagcagcagcgcagtgagctgctggaagtgaacaagcagtgggaccagcatttccggtccatgaagcagcagtatgagcagaagatcactgagctgcgtcagaagctggctgatttgcagaagcaggtgactgacctggaggccgagcgggagcagaagcagcgtgactttgaccgcaagctcctcctggccaagtccaagattgaaatggaggagaccgacaaggagcagctgacagcagaggccaaggagctgcgccaaaaggtcaagtacctgcaggatcagctgagcccactcacccgacagcgtgagtaccaggaaaaggagatccagcggctcaacaaggccctggaggaagcactgagcatccaaaccccgccatcatctccaccaacagcatttgggagcccagaaggagcaggggccctcctaaggaaacaggagctggtcacgcagaatgagttgctgaaacagcaggtgaagatcttcgaggaggacttccagagggagcgcagtgatcgtgagcgcatgaatgaggagaaggaagagctgaagaagcaagtggagaagctgcaggcccaggtcaccctgtcaaatgcccagctaaaagcattcaaagatgaggagaaggcaagagaagccctcagacagcagaagaggaaagcaaaggcctcaggagagcgttaccatgtggagccccacccagaacatctctgcggggcctacccctacgcctacccgcccatgccagccatggtgccacaccatggcttcgaggactggtcccagatccgctacccccctccccccatggccatggagcacccgcccccactccccaactcgcgcctcttccatctgccggaatacacctggcgtctaccctgtggaggggttcgaaatccaaatcagagctcccaagtgatggaccctcccacagccaggcctacagaaccagagtctccaaaaaatgaccgtgaggggcctcagtgagaccagattgtgtcatttggctccaccttcatcttgcagagccagctgatctcaattgccaaaaactagaagccacttgcacggtgtggccagagcctcagctggatgagaggctgagatgggtggccagcttgtacaccagtccctgaactgagctgtttacaggactggggaggctccacccagaaggctttcatttgtactctgctgggagtgactgggaaaaactccttccctgctgctgagtggagagaggcctcatccggctttgacccccatccttgcagaagcctccaggagcagcaatcctaagagtgggaggcagccaagacccccttccttcaaaacctcccggaagtggtttcaggccctctagttgccatgaccaatttgtgtgtgtgtttaatttttgcttcaagctctgtagcaggacctgccccacgcacacccctacccctctgtgaggagctgtgggaagtgtgggtttgtctccagaacagaagagaatgatggatattctggctctggggccctctccaccaccactcacagtagccttgctgaagccatcacagatgggagaaggccatgccagccacgtccgccgaggggcgccagcctgaagctgccaggccctgaggttcagaccctggaccccatagctggaggcctgtggtgccagaagcccagattagggtggctgtccatccctggatagctatttgcacgaatcatggacataaatccaagttg

SEQ ID NO: 58 - DNA, 3775 bp, Homo sapiens
cattcataagactcagagctacggccacggcagggacacgcggaaccaagacttggaaacttgattgttgtggttcttcttgggggttatgaaatttcattaatcttttttttttccggggagaaagtttttggaaagattcttccagatatttcttcattttcttttggaggaccgacttactttttttggtcttctttattactcccctccccccgtgggacccgccggacgcgtggaggagaccgtagctgaagctgattctgtacagcgggacagcgctttctgcccctgggggagcaacccctccctcgcccctgggtcctacggagcctgcactttcaagaggtacagcggcatcctgtgggggcctgggcaccgcaggaagactgcacagaaactttgccattgttggaacgggacgttgctccttccccgagcttccccggacagcgtactttgaggactcgctcagctcaccggggactcccacggctcaccccggacttgcaccttacttccccaacccggccatagccttggcttcccggcgacctcagcgtggtcacaggggcccccctgtgcccagggaaatgtttcaggctttccccggagactacgactccggctcccggtgcagctcctcaccctctgccgagtctcaatatctgtcttcggtggactccttcggcagtccacccaccgccgcggcctcccaggagtgcgccggtctcggggaaatgcccggttccttcgtgcccacggtcaccgcgatcacaaccagccaggacctccagtggcttgtgcaacccaccctcatctcttccatggcccagtcccaggggcagccactggcctcccagcccccggtcgtcgacccctacgacatgccgggaaccagctactccacaccaggcatgagtggctacagcagtggcggagcgagtggcagtggtgggccttccaccagcggaactaccagtgggcctgggcctgcccgcccagcccgagcccggcctaggagaccccgagaggagacgctcaccccagaggaagaggagaagcgaagggtgcgccgggaacgaaataaactagcagcagctaaatgcaggaaccggcggagggagctgaccgaccgactccaggcggagacagatcagttggaggaagaaaaagcagagctggagtcggagatcgccgagctccaaaaggagaaggaacgtctggagtttgtgctggtggcccacaaaccgggctgcaagatcccctacgaagaggggcccgggccgggcccgctggcggaggtgagagatttgccgggctcagcaccggctaaggaagatggcttcagctggctgctgccgcccccgccaccaccgcccctgcccttccagaccagccaagacgcaccccccaacctgacggcttctctctttacacacagtgaagttcaagtcctcggcgaccccttccccgttgttaacccttcgtacacttcttcgtttgtcctcacctgcccggaggtctccgcgttcgccggcgcccaacgcaccagcggcagtgaccagccttccgatcccctgaactcgccctccctcctcgctcggtgaactctttagacacacaaaacaaacaaacacatgggggagagagacttggaagaggaggaggaggaggagaaggaggagagagaggggaagagacaaagtgggtgtgtggcctccctggctcctccgtctgaccctctgcggccactgcgccactgccatcggacaggaggattccttgtgttttgtcctgcctcttgtttctgtgccccggcgaggccggagagctggtgactttggggacagggggtgggaaggggatggacacccccagctgactgttggctctctgacgtcaacccaagctctggggatgggtggggaggggggcgggtgacgcccaccttcgggcagtcctgtgtgaggatgaagggacgggggtgggaggtaggctgtggggtgggctggagtcctctccagagaggctcaacaaggaaaaatgccactccctacccaatgtctcccacacccaccctttttttggggtgcccaggttggtttcccctgcactcccgaccttagcttattgatcccacatttccatggtgtgagatcctctttactctgggcagaagtgagcccccccttaaagggaattcgatgcccccctagaataatctcatccccccacccgacttcttttgaaatgtgaacgtccttccttgactgtctagccactccctcccagaaaaactggctctgattggaatttctggcctcctaaggctccccaccccgaaatcagcccccagccttgtttctgatgacagtgttatcccaagaccctgccccctgccagccgaccctcctggccttcctcgttgggccgctctgatttcaggcagcaggggctgctgtgatgccgtcctgctggagtgatttatactgtgaaatgagttggccagattgtggggtgcagctgggtggggcagcacacctctggggggataatgtccccactcccgaaagcctttcctcggtctcccttccgtccatcccccttcttcctcccctcaacagtgagttagactcaagggggtgacagaaccgagaagggggtgacagtcctccatccacgtggcctctctctctctcctcaggaccctcagccctggcctttttctttaaggtcccccgaccaatccccagcctaggacgccaacttctcccaccccttggcccctcacatcctctccaggaaggcagtgaggggctgtgacatttttccggagaagatttcagagctgaggctttggtacccccaaacccccaatatttttggactggcagactcaaggggctggaatctcatgattccatgcccgagtccgcccatccctgaccatggttttggctctcccaccccgccgttccctgcgcttcatctcatgaggatttctttatgaggcaaatttatattttttaatatcggggggtggaccacgccgccctccatccgtgctgcatgaaaaacattccacgtgccccttgtcgcgcgtctcccatcctgatcccagacccattccttagctatttatccctttcctggtttccgaaaggcaattatatctattatgtataagtaaatatattatatatggatgtgtgtgtgtgcgtgcgcgtgagtgtgtgagcgcttctgcagcctcggcctaggtcacgttggccctcaaagcgagccgttgaattggaaactgcttctagaaactctggctcagcctgtctcgggctgacccttttctgatcgtctcggcccctctgattgttcccgatggtctctctccctctgtcttttctcctccgcctgtgtccatctgaccgttttcacttgtctcctttctgactgtccctgccaatgctccagctgtcgtctgactctgggttcgttggggacatgagattttattttttgtgagtgagactgagggatcgtagatttttacaatctgtatctttgacaattctgggtgcgagtgtgagagtgtgagcagggcttgctcctgccaaccacaattcaatgaatccccgacccccctaccccatgctgtacttgtggttctctttttgtattttgcatctgaccccggggggctgggacagattggcaatgggccgtcccctctccccttggttctgcactgttgccaataaaaagctcttaaaaacgc

SEQ ID NO: 59 - DNA, 3429 bp, Homo sapiens
ggctggaagccggaagcgagcaaagtggagccgactcgaactccaccggcacgagggcggaaaagaaagcctcagaacgttcgctcgctgcgtccccagccggggccgagccctccgcgacgccacccgggccatgggggccgcacgcagcccgccgtccgctgtcccggggcccctgctggggctgctcctgctgctcctgggcgtgctggccccgggtggcgcctccctgcgactcctggaccaccgggcgctggtctgctcccagccggggctaaactgcacggtcaagaatagtacctgcctggatgacagctggattcaccctcgaaacctgaccccctcctccccaaaggacctgcagatccagctgcactttgcccacacccaacaaggagacctgttccccgtggctcacatcgaatggacactgcagacagacgccagcatcctgtacctcgagggtgcagagttatctgtcctgcagctgaacaccaatgaacgtttgtgcgtcaggtttgagtttctgtccaaactgaggcatcaccacaggcggtggcgttttaccttcagccactttgtggttgaccctgaccaggaatatgaggtgaccgttcaccacctgcccaagcccatccctgatggggacccaaaccaccagtccaagaatttccttgtgcctgactgtgagcacgccaggatgaaggtaaccacgccatgcatgagctcaggcagcctgtgggaccccaacatcaccgtggagaccctggaggcccaccagctgcgtgtgagcttcaccctgtggaacgaatctacccattaccagatcctgctgaccagttttccgcacatggagaaccacagttgctttgagcacatgcaccacatacctgcgcccagaccagaagagttccaccagcgatccaacgtcacactcactctacgcaaccttaaagggtgctgtcgccaccaagtgcagatccagcccttcttcagcagctgcctcaatgactgcctcagacactccgcgactgtttcctgcccagaaatgccagacactccagaaccaattccggactacatgcccctgtgggtgtactggttcatcacgggcatctccatcctgctggtgggctccgtcatcctgctcatcgtctgcatgacctggaggctagctgggcctggaagtgaaaaatacagtgatgacaccaaatacaccgatggcctgcctgcggctgacctgatccccccaccgctgaagcccaggaaggtctggatcatctactcagccgaccaccccctctacgtggacgtggtcctgaaattcgcccagttcctgctcaccgcctgcggcacggaagtggccctggacctgctggaagagcaggccatctcggaggcaggagtcatgacctgggtgggccgtcagaagcaggagatggtggagagcaactctaagatcatcgtcctgtgctcccgcggcacgcgcgccaagtggcaggcgctcctgggccggggggcgcctgtgcggctgcgctgcgaccacggaaagcccgtgggggacctgttcactgcagccatgaacatgatcctcccggacttcaagaggccagcctgcttcggcacctacgtagtctgctacttcagcgaggtcagctgtgacggcgacgtccccgacctgttcggcgcggcgccgcggtacccgctcatggacaggttcgaggaggtgtacttccgcatccaggacctggagatgttccagccgggccgcatgcaccgcgtaggggagctgtcgggggacaactacctgcggagcccgggcggcaggcagctccgcgccgccctggacaggttccgggactggcaggtccgctgtcccgactggttcgaatgtgagaacctctactcagcagatgaccaggatgccccgtccctggacgaagaggtgtttgaggagccactgctgcctccgggaaccggcatcgtgaagcgggcgcccctggtgcgcgagcctggctcccaggcctgcctggccatagacccgctggtcggggaggaaggaggagcagcagtggcaaagctggaacctcacctgcagccccggggtcagccagcgccgcagcccctccacaccctggtgctcgccgcagaggagggggccctggtggccgcggtggagcctgggcccctggctgacggtgccgcagtccggctggcactggcgggggagggcgaggcctgcccgctgctgggcagcccgggcgctgggcgaaatagcgtcctcttcctccccgtggaccccgaggactcgccccttggcagcagcacccccatggcgtctcctgacctccttccagaggacgtgagggagcacctcgaaggcttgatgctctcgctcttcgagcagagtctgagctgccaggcccaggggggctgcagtagacccgccatggtcctcacagacccacacacgccctacgaggaggagcagcggcagtcagtgcagtctgaccagggctacatctccaggagctccccgcagccccccgagggactcacggaaatggaggaagaggaggaagaggagcaggacccagggaagccggccctgccactctctcccgaggacctggagagcctgaggagcctccagcggcagctgcttttccgccagctgcagaagaactcgggctgggacacgatggggtcagagtcagaggggcccagtgcatgagggcggctccccagggaccgcccagatcccagctttgagagaggagtgtgtgtgcacgtattcatctgtgtgtacatgtctgcatgtgtatatgttcgtgtgtgaaatgtaggctttaaaatgtaaatgtctggattttaatcccaggcatccctcctaacttttctttgtgcagcggtctggttatcgtctatccccaggggaatccacacagcccgctcccaggagctaatggtagagcgtccttgaggctccattattcgttcattcagcatttattgtgcacctactatgtggcgggcatttgggataccaagataaattgcatgcggcatggccccagccatgaaggaacttaaccgctagtgccgaggacacgttaaacgaacaggatgggccgggcacggtggctcacgcctgtaatcccagcacactgggaggccgaggcaggtggatcactctgaggtcaggagtttgagccagcctggccaacatggtgaaaccccatctccactaaaaatagaaaaattagccgggcatggtgacacatgcctgtagtcctagctacttgggaggctgaggcaggagaattgcttgaatctgggaggcagaggttgcagtgagccgagattgtgccattgcactgcagcctggatgacagagcgagactctatctcaaaaaaaaaaaaaaaaaa

SEQ ID NO: 60 - DNA, 4819 bp, Homo sapiens
cgctgtctctccccctcggctcggagaggcccttcggcctgagggagcctcgccgcccgtccccggcacacgcgcagccccggcctctcggcctctgccggagaaacagttgggacccctgattttagcaggatggcccaatggaatcagctacagcagcttgacacacggtacctggagcagctccatcagctctacagtgacagcttcccaatggagctgcggcagtttctggccccttggattgagagtcaagattgggcatatgcggccagcaaagaatcacatgccactttggtgtttcataatctcctgggagagattgaccagcagtatagccgcttcctgcaagagtcgaatgttctctatcagcacaatctacgaagaatcaagcagtttcttcagagcaggtatcttgagaagccaatggagattgcccggattgtggcccggtgcctgtgggaagaatcacgccttctacagactgcagccactgcggcccagcaagggggccaggccaaccaccccacagcagccgtggtgacggagaagcagcagatgctggagcagcaccttcaggatgtccggaagagagtgcaggatctagaacagaaaatgaaagtggtagagaatctccaggatgactttgatttcaactataaaaccctcaagagtcaaggagacatgcaagatctgaatggaaacaaccagtcagtgaccaggcagaagatgcagcagctggaacagatgctcactgcgctggaccagatgcggagaagcatcgtgagtgagctggcggggcttttgtcagcgatggagtacgtgcagaaaactctcacggacgaggagctggctgactggaagaggcggcaacagattgcctgcattggaggcccgcccaacatctgcctagatcggctagaaaactggataacgtcattagcagaatctcaacttcagacccgtcaacaaattaagaaactggaggagttgcagcaaaaagtttcctacaaaggggaccccattgtacagcaccggccgatgctggaggagagaatcgtggagctgtttagaaacttaatgaaaagtgcctttgtggtggagcggcagccctgcatgcccatgcatcctgaccggcccctcgtcatcaagaccggcgtccagttcactactaaagtcaggttgctggtcaaattccctgagttgaattatcagcttaaaattaaagtgtgcattgacaaagactctggggacgttgcagctctcagaggatcccggaaatttaacattctgggcacaaacacaaaagtgatgaacatggaagaatccaacaacggcagcctctctgcagaattcaaacacttgaccctgagggagcagagatgtgggaatgggggccgagccaattgtgatgcttccctgattgtgactgaggagctgcacctgatcacctttgagaccgaggtgtatcaccaaggcctcaagattgacctagagacccactccttgccagttgtggtgatctccaacatctgtcagatgccaaatgcctgggcgtccatcctgtggtacaacatgctgaccaacaatcccaagaatgtaaacttttttaccaagcccccaattggaacctgggatcaagtggccgaggtcctgagctggcagttctcctccaccaccaagcgaggactgagcatcgagcagctgactacactggcagagaaactcttgggacctggtgtgaattattcagggtgtcagatcacatgggctaaattttgcaaagaaaacatggctggcaagggcttctccttctgggtctggctggacaatatcattgaccttgtgaaaaagtacatcctggccctttggaacgaagggtacatcatgggctttatcagtaaggagcgggagcgggccatcttgagcactaagcctccaggcaccttcctgctaagattcagtgaaagcagcaaagaaggaggcgtcactttcacttgggtggagaaggacatcagcggtaagacccagatccagtccgtggaaccatacacaaagcagcagctgaacaacatgtcatttgctgaaatcatcatgggctataagatcatggatgctaccaatatcctggtgtctccactggtctatctctatcctgacattcccaaggaggaggcattcggaaagtattgtcggccagagagccaggagcatcctgaagctgacccaggtagcgctgccccatacctgaagaccaagtttatctgtgtgacaccattcattgatgcagtttggaaataatggtgaaggtgctgaaccctcagcaggagggcagtttgagtccctcacctttgacatggagttgacctcggagtgcgctacctcccccatgtgaggagctgagaacggaagctgcagaaagatacgactgaggcgcctacctgcattctgccacccctcacacagccaaaccccagatcatctgaaactactaactttgtggttccagattttttttaatctcctacttctgctatctttgagcaatctgggcacttttaaaaatagagaaatgagtgaatgtgggtgatctgcttttatctaaatgcaaataaggatgtgttctctgagacccatgatcaggggatgtggcggggggtggctagagggagaaaaaggaaatgtcttgtgttgttttgttcccctgccctcctttctcagcagctttttgttattgttgttgttgttcttagacaagtgcctcctggtgcctgcggcatccttctgcctgtttctgtaagcaaatgccacaggccacctatagctacatactcctggcattgcactttttaaccttgctgacatccaaatagaagataggactatctaagccctaggtttctttttaaattaagaaataataacaattaaagggcaaaaaacactgtatcagcatagcctttctgtatttaagaaacttaagcagccgggcatggtggctcacgcctgtaatcccagcactttgggaggccgaggcggatcataaggtcaggagatcaagaccatcctggctaacacggtgaaaccccgtctctactaaaagtacaaaaaattagctgggtgtggtggtgggcgcctgtagtcccagctactcgggaggctgaggcaggagaatcgcttgaacctgagaggcggaggttgcagtgagccaaaattgcaccactgcacactgcactccatcctgggcgacagtctgagactctgtctcaaaaaaaaaaaaaaaaaaaagaaacttcagttaacagcctccttggtgctttaagcattcagcttccttcaggctggtaatttatataatccctgaaacgggcttcaggtcaaacccttaagacatctgaagctgcaacctggcctttggtgttgaaataggaaggtttaaggagaatctaagcattttagacttttttttataaatagacttattttcctttgtaatgtattggccttttagtgagtaaggctgggcagagggtgcttacaaccttgactccctttctccctggacttgatctgctgtttcagaggctaggttgtttctgtgggtgccttatcagggctgggatacttctgattctggcttccttcctgccccaccctcccgaccccagtccccctgatcctgctagaggcatgtctccttgcgtgtctaaaggtccctcatcctgtttgttttaggaatcctggtctcaggacctcatggaagaagagggggagagagttacaggttggacatgatgcacactatggggccccagcgacgtgtctggttgagctcagggaatatggttcttagccagtttcttggtgatatccagtggcacttgtaatggcgtcttcattcagttcatgcagggcaaaggcttactgataaacttgagtctgccctcgtatgagggtgtatacctggcctccctctgaggctggtgactcctccctgctggggccccacaggtgaggcagaacagctagagggcctccccgcctgcccgccttggctggctagctcgcctctcctgtgcgtatgggaacacctagcacgtgctggatgggctgcctctgactcagaggcatggccggatttggcaactcaaaaccaccttgcctcagctgatcagagtttctgtggaattctgtttgttaaatcaaattagctggtctctgaattaagggggagacgaccttctctaagatgaacagggttcgccccagtcctcctgcctggagacagttgatgtgtcatgcagagctcttacttctccagcaacactcttcagtacataataagcttaactgataaacagaatatttagaaaggtgagacttgggcttaccattgggtttaaatcatagggacctagggcgagggttcagggcttctctggagcagatattgtcaagttcatggccttaggtagcatgtatctggtcttaactctgattgtagcaaaagttctgagaggagctgagccctgttgtggcccattaaagaacagggtcctcaggccctgcccgcttcctgtccactgccccctccccatccccagcccagccgagggaatcccgtgggttgcttacctacctataaggtggtttataagctgctgtcctggccactgcattcaaattccaatgtgtacttcatagtgtaaaaatttatattattgtgaggttttttgtcttttttttttttttttttttttggtatattgctgtatctactttaacttccagaaataaacgttatataggaaccgtaaaa

SEQ ID NO: 61 - DNA, 4266 bp, Homo sapiens
cttcctctgccaccatggggaactgggctgtgaatgaggggctctccatttttgtcattctggtttggctggggttgaacgtcttcctctttgtctggtattaccgggtttatgatattccacctaagttcttttacacaagaaaacttcttgggtcagcactggcactggccagggcccctgcagcctgcctgaatttcaactgcatgctgattctcttgccagtctgtcgaaatctgctgtccttcctcaggggttccagtgcgtgctgctcaacaagagttcgaagacaactggacaggaatctcacctttcataaaatggtggcatggatgattgcacttcactctgcgattcacaccattgcacatctatttaatgtggaatggtgtgtgaatgcccgagtcaataattctgatccttattcagtagcactctctgaacttggagacaggcaaaatgaaagttatctcaattttgctcgaaagagaataaagaaccctgaaggaggcctgtacctggctgtgaccctgttggcaggcatcactggagttgtcatcacgctgtgcctcatattaattatcacttcctccaccaaaaccatccggaggtcttactttgaagtcttttggtacacacatcatctctttgtgatcttcttcattggccttgccatccatggagctgaacgaattgtacgtgggcagaccgcagagagtttggctgtgcataatataacagtttgtgaacaaaaaatctcagaatggggaaaaataaaggaatgcccaatccctcagtttgctggaaaccctcctatgacttggaaatggatagtgggtcccatgtttctgtatctctgtgagaggttggtgcggttttggcgatctcaacagaaggtggtcatcaccaaggtggtcactcaccctttcaaaaccatcgagctacagatgaagaagaaggggttcaaaatggaagtgggacaatacatttttgtcaagtgcccaaaggtgtccaagctggagtggcacccttttacactgacatccgcccctgaggaagacttctttagtatccatatccgcatcgttggggactggacagaggggctgttcaatgcttgtggctgtgataagcaggagtttcaagatgcgtggaaactacctaagatagcggttgatgggccctttggcactgccagtgaagatgtgttcagctatgaggtggtgatgttagtgggagcagggattggggtcacacccttcgcatccattctcaagtcagtctggtacaaatattgcaataacgccaccaatctgaagctcaaaaagatctacttctactggctgtgccgggacacacatgcctttgagtggtttgcagatctgctgcaactgctggagagccagatgcaggaaaggaacaatgccggcttcctcagctacaacatctacctcactggctgggatgagtctcaggccaatcactttgctgtgcaccatgatgaggagaaagatgtgatcacaggcctgaaacaaaagactttgtatggacggcccaactgggataatgaattcaagacaattgcaagtcaacaccctaataccagaataggagttttcctctgtggacctgaagccttggctgaaaccctgagtaaacaaagcatctccaactctgagtctggccctcggggagtgcatttcattttcaacaaggaaaacttctaacttgtctcttccatgaggaaataaatgtgggttgtgctgccaaatgctcaaataatgctaattgataatataaataccccctgcttaaaaatggacaaaaagaaactataatgtaatggttttcccttaaaggaatgtcaaagattgtttgatagtgataagttacatttatgtggagctctatggttttgagagcacttttacaaacattatttcatttttttcctctcagtaatgtcagtggaagttagggaaaagattcttggactcaattttagaatcaaaagggaaaggatcaaaaggttcagtaacttccctaagattatgaaactgtgaccagatctagcccatcttactccaggtttgatactctttccacaatactgagctgcctcagaatcctcaaaatcagtttttatattccccaaaagaagaaggaaaccaaggagtagctatatatttctactttgtgtcatttttgccatcattattatcatactgaaggaaattttccagatcattaggacataatacatgttgagagtgtctcaacacttattagtgacagtattgacatctgagcatactccagtttactaatacagcagggtaactgggccagatgttctttctacagaagaatattggattgattggagttaatgtaatactcatcatttaccactgtgcttggcagagagcggatactcaagtaagttttgttaaatgaatgaatgaatttagaaccacacaatgccaagatagaattaatttaaagccttaaacaaaatttatctaaagaaataacttctattactgtcatagaccaaaggaatctgattctccctagggtcaagaacaggctaaggatactaaccaataggattgcctgaagggttctgcacattcttatttgaagcatgaaaaaagagggttggaggtggagaattaacctcctgccatgactctggctcatctagtcctgctccttgtgctataaaataaatgcagactaatttcctgcccaaagtggtcttctccagctagcccttatgaatattgaacttaggaattgtgacaaatatgtatctgatatggtcatttgttttaaataacacccaccccttattttccgtaaatacacacacaaaatggatcgcatctgtgtgactaatggtttatttgtattatatcatcatcatcatcctaaaattaacaacccagaaacaaaaatctctatacagagatcaaattcacactcaatagtatgttctgaatatatgttcaagagagagtctctaaatcactgttagtgtggccaagagcagggttttctttttgttcttagaactgctcccatttctgggaactaaaaccagttttatttgccccaccccttggagccacaaatgtttagaactcttcaacttcggtaatgaggaagaaggagaaagagctgggggaagggcagaagactggtttaggaggaaaaggaaataaggagaaaagagaatgggagagtgagagaaaataaaaaaggcaaaagggagagagaggggaagggggtctcatattggtcattccctgccccagatttcttaaagtttgatatgtatagaatataattgaaggaggtatacacatactgatgttgttttgattatctatggtattgaatcttttaaaatctggtcacaaattttgatgctgagggggattattcaagggactaggatgaactaaataagaactcagttgttctttgtcatactactattcctttcgtctcccagaatcctcagggcactgagggtaggtctgacaaataaggcctgctgtgcgaatatagcctttctgaaatgtaccaggatggtttctgcttagagacacttaggtccagcctgttcacactgcacctcaggtatcaattcatctattcaacagatatttattgtgttattactatgagtcaggctctgtttattgtttcaattctttacaccaaagtatgaactggagagggtacctcagttataaggagtctgagaatattggccctttctaacctatgtgcataattaaaaccagcttcatttgttgctccgagagtgtttctccaaggttttctatcttcaaaaccaactaagttatgaaagtagagagatctgccctgtgttatccagttatgagataaaaaatgaatataagagtgcttgtcattataaaagtttcctttttatctctcaagccaccagctgccagccaccacgagccagctgccagcctagctttttttttttttttttttttagcacttagtatttagcatttattaacaggtactctaagaatgatgaagcattgtttttaatcttaagactatgaaggtttttcttagttcttctgcttttgcaattgtgtttgtgaaatttgaatacttgcaggctttgtatgtgaataattctagcgggggacctgggagataattctacggggaattcttaaaactgtgctcaactattaaaatgaatgagctttc

SEQ ID NO: 62 - DNA, 2534 bp, Homo sapiens
atggccctgtccactgagcatcctcccgccacacagaaacccgcccagccggggccaccgaccccaccccctgcctggaaacttaaggaggccggagctgtggggagctcagagctgagatcctacaggagtccagggctggagagaaaacctctgcgaggaaagggaaggagcaagccgtgaatttaagggacgctgtgaagcaatcatggatgcaatgaagagagggctctgctgtgtgctgctgctgtgtggagcagtcttcgtttcgcccagccaggaaatccatgcccgattcagaagaggagccagatcttaccaaggttgcagcgagccaaggtgtttcaacgggggcacctgccagcaggccctgtacttctcagatttcgtgtgccagtgccccgaaggatttgctgggaagtgctgtgaaatagataccagggccacgtgctacgaggaccagggcatcagctacaggggcacgtggagcacagcggagagtggcgccgagtgcaccaactggaacagcagcgcgttggcccagaagccctacagcgggcggaggccagacgccatcaggctgggcctggggaaccacaactactgcagaaacccagatcgagactcaaagccctggtgctacgtctttaaggcggggaagtacagctcagagttctgcagcacccctgcctgctctgagggaaacagtgactgctactttgggaatgggtcagcctaccgtggcacgcacagcctcaccgagtcgggtgcctcctgcctcccgtggaattccatgatcctgataggcaaggtttacacagcacagaaccccagtgcccaggcactgggcctgggcaaacataattactgccggaatcctgatggggatgccaagccctggtgccacgtgctgaagaaccgcaggctgacgtgggagtactgtgatgtgccctcctgctccacctgcggcctgagacagtacagccagcctcagtttcgcatcaaaggagggctcttcgccgacatcgcctcccacccctggcaggctgccatctttgccaagcacaggaggtcgcccggagagcggttcctgtgcgggggcatactcatcagctcctgctggattctctctgccgcccactgcttccaggagaggtttccgccccaccacctgacggtgatcttgggcagaacataccgggtggtccctggcgaggaggagcagaaatttgaagtcgaaaaatacattgtccataaggaattcgatgatgacacttacgacaatgacattgcgctgctgcagctgaaatcggattcgtcccgctgtgcccaggagagcagcgtggtccgcactgtgtgccttcccccggcggacctgcagctgccggactggacggagtgtgagctctccggctacggcaagcatgaggccttgtctcctttctattcggagcggctgaaggaggctcatgtcagactgtacccatccagccgctgcacatcacaacatttacttaacagaacagtcaccgacaacatgctgtgtgctggagacactcggagcggcgggccccaggcaaacttgcacgacgcctgccagggcgattcgggaggccccctggtgtgtctgaacgatggccgcatgactttggtgggcatcatcagctggggcctgggctgtggacagaaggatgtcccgggtgtgtacaccaaggttaccaactacctagactggattcgtgacaacatgcgaccgtgaccaggaacacccgactcctcaaaagcaaatgagatcccgcctcttcttcttcagaagacactgcaaaggcgcagtgcttctctacagacttctccagacccaccacaccgcagaagcgggacgagaccctacaggagagggaagagtgcattttcccagatacttcccattttggaagttttcaggacttggtctgatttcaggatactctgtcagatgggaagacatgaatgcacactagcctctccaggaatgcctcctccctgggcagaaagtggccatgccaccctgttttcagctaaagcccaacctcctgacctgtcaccgtgagcagctttggaaacaggaccacaaaaatgaaagcatgtctcaatagtaaaagataacaagatctttcaggaaagacggattgcattagaaatagacagtatatttatagtcacaagagcccagcagggcctcaaagttggggcaggctggctggcccgtcatgttcctcaaaagcacccttgacgtcaagtctccttcccctttccccactccctggctctcagaaggtattccttttgtgtacagtgtgtaaagtgtaaatcctttttctttataaactttagagtagcatgagagaattgtatcatttgaacaactaggcttcagcatatttatagcaatccatgttagtttttactttctgttgccacaaccctgttttatactgtacttaataaattcagatatatttttcacagtttttccaaaaaaaaaaaaaaaaaaa

SEQ ID NO: 63 - DNA, 3734 bp, Homo sapiens
gcggagcgtgtgacgctgcggccgccgcggacctggggattaatgggaaaagttttggcaggagcgggagaattctgcggagcctgcgggacggcggcggtggcgccgtaggcagccgggacagtgttgtacagtgttttgggcatgcacgtgatactcacacagtggcttctgctcaccaacagatgaagacagatgcaccaacgaggctgatgggaaccaccctgtagaggtccatctgcgttcagacccagacgatgccagagctatgactgggcctgcaggtgtggcgccgaggggagatcagccatggagcagccacaggaggaagcccctgaggtccgggaagaggaggagaaagaggaagtggcagaggcagaaggagccccagagctcaatgggggaccacagcatgcacttccttccagcagctacacagacctctcccggagctcctcgccaccctcactgctggaccaactgcagatgggctgtgacggggcctcatgcggcagcctcaacatggagtgccgggtgtgcggggacaaggcatcgggcttccactacggtgttcatgcatgtgaggggtgcaagggcttcttccgtcgtacgatccgcatgaagctggagtacgagaagtgtgagcgcagctgcaagattcagaagaagaaccgcaacaagtgccagtactgccgcttccagaagtgcctggcactgggcatgtcacacaacgctatccgttttggtcggatgccggaggctgagaagaggaagctggtggcagggctgactgcaaacgaggggagccagtacaacccacaggtggccgacctgaaggccttctccaagcacatctacaatgcctacctgaaaaacttcaacatgaccaaaaagaaggcccgcagcatcctcaccggcaaagccagccacacggcgccctttgtgatccacgacatcgagacattgtggcaggcagagaaggggctggtgtggaagcagttggtgaatggcctgcctccctacaaggagatcagcgtgcacgtcttctaccgctgccagtgcaccacagtggagaccgtgcgggagctcactgagttcgccaagagcatccccagcttcagcagcctcttcctcaacgaccaggttacccttctcaagtatggcgtgcacgaggccatcttcgccatgctggcctctatcgtcaacaaggacgggctgctggtagccaacggcagtggctttgtcacccgtgagttcctgcgcagcctccgcaaacccttcagtgatatcattgagcctaagtttgaatttgctgtcaagttcaacgccctggaacttgatgacagtgacctggccctattcattgcggccatcattctgtgtggagaccggccaggcctcatgaacgttccacgggtggaggctatccaggacaccatcctgcgtgccctcgaattccacctgcaggccaaccaccctgatgcccagtacctcttccccaagctgctgcagaagatggctgacctgcggcaactggtcaccgagcacgcccagatgatgcagcggatcaagaagaccgaaaccgagacctcgctgcaccctctgctccaggagatctacaaggacatgtactaacggcggcacccaggcctccctgcagactccaatggggccagcactggaggggcccacccacatgacttttccattgaccagcccttgagcacccggcctggagcagcagagtcccacgatcgccctcagacacatgacacccacggcctctggctccctgtgccctctctcccgcttcctccagccagctctcttcctgtctttgttgtctccctctttctcagttcctctttcttttctaattcctgttgctctgtttcttcctttctgtaggtttctctcttcccttctcccttgccctccctttctctctccaccccccacgtctgtcctcctttcttattctgtgagatgttttgtattatttcaccagcagcatagaacaggacctctgcttttgcacaccttttccccaggagcagaagagagtggggcctgccctctgccccatcattgcacctgcaggcttaggtcctcacttctgtctcctgtcttcagagcaaaagacttgagccatccaaagaaacactaagctctctgggcctgggttccagggaaggctaagcatggcctggactgactgcagccccctatagtcatggggtccctgctgcaaaggacagtgggcaggaggccccaggctgagagccagatgcctccccaagactgtcattgcccctccgatgctgaggccacccactgacccaactgatcctgctccagcagcacacctcagccccactgacacccagtgtccttccatcttcacactggtttgccaggccaatgttgctgatggccccctgcactggccgctggacggcactctcccagcttggaagtaggcagggttccctccaggtgggcccccacctcactgaagaggagcaagtctcaagagaaggaggggggattggtggttggaggaagcagcacacccaattctgcccctaggactcggggtctgagtcctggggtcaggccagggagagctcggggcaggccttccgccagcactcccactgcccccctgcccagtagcagccgcccacattgtgtcagcatccagggccagggcctggcctcacatccccctgctcctttctctagctggctccacgggagttcaggccccactccccctgaagctgcccctccagcacacacacataagcactgaaatcactttacctgcaggctccatgcacctcccttccctccctgaggcaggtgagaacccagagagaggggcctgcaggtgagcaggcagggctgggccaggtctccggggaggcaggggtcctgcaggtcctggtgggtcagcccagcacctgctcccagtgggagcttcccgggataaactgagcctgttcattctgatgtccatttgtcccaatagctctactgccctccccttcccctttactcagcccagctggccacctagaagtctccctgcacagcctctagtgtccggggaccttgtgggaccagtcccacaccgctggtccctgccctcccctgctcccaggttgaggtgcgctcacctcagagcagggccaaagcacagctgggcatgccatgtctgagcggcgcagagccctccaggcctgcaggggcaaggggctggctggagtctcagagcacagaggtaggagaactggggttcaagcccaggcttcctgggtcctgcctggtcctccctcccaaggagccattctgtgtgtgactctgggtggaagtgcccagcccctgcccctacgggcgctgcagcctcccttccatgccccaggatcactctctgctggcaggattcttcccgctccccacctacccagctgatgggggttggggtgcttcctttcaggccaaggctatgaagggacagctgctgggacccacctccccctccccggccacatgccgcgtccctgccccgacccgggtctggtgctgaggatacagctcttctcagtgtctgaacaatctccaaaattgaaatgtatatttttgctaggagccccagcttcctgtgtttttaatataaatagtgtacacagactgacgaaactttaaataaatgggaattaaatatttaa

SEQ ID NO: 64 - DNA, 438 bp, Homo sapiens
  misc_feature (253)..(253): n is a, c, g or t.
  misc_feature (373)..(373): n is a, c, g or t.
  misc_feature (388)..(388): n is a, c, g or t.
  misc_feature (427)..(427): n is a, c, g or t.
  misc_feature (436)..(436): n is a, c, g or t.
catgcaccaagattcttttaattttaccaaagaatctaagaatttccttagtatattatagcttttttgtttcctttacttttttcttaattgcctgacagatgaaaataaagctcaatggcactcttatctattgaggatcaattggaaataagaataatctacgtaaatgggaaaaatgacttgcaaaaacacaccctatgcccatcatcttctgggaacacatctgtttgttagctgggaagcagagcgnaggacagccttccagatcccttgataatgaaaattcatccaaagggttatgatgatgatgatgatggctggcatacaccagattcctgtttctccatgacaaccaacatctaaaacccanctcaaaactcttcgntcataggggtaatgttcaaggatccataggctaaagganaacaccaantt

SEQ ID NO: 65 - DNA, 2715 bp, Homo sapiens
atggcgactgatacgtctcaaggtgaactcgtccatcctaaggcactcccacttatagtaggagctcagctgatccacgcggacaagttaggtgagaaggtagaagatagcaccatgccgattcgtcgaactgtgaattctacccgggaaactcctcccaaaagcaagcttgctgaaggggaggaagaaaagccagaaccagacataagttcagaggaatctgtctccactgtagaagaacaagagaatgaaactccacctgctacttcgagtgaggcagagcagccaaagggggaacctgagaatgaagagaaggaagaaaataagtcttctgaggaaaccaaaaaggatgagaaagatcagtcaaaagaaaaggagaagaaagtgaaaaaaacaattccttcctgggctaccctttctgccagccagctagccagggcccagaaacaaacaccgatggcttcttccccacgtcccaagatggatgcaatcttaactgaggccattaaggcatgcttccagaagagtggtgcatcagtggttgctattcgaaaatacatcatccataagtatccttctctggagctggagagaaggggttatctccttaaacaagcactgaaaagagaattaaatagaggagtcatcaaacaggttaaaggaaaaggtgcttctggaagttttgttgtggttcagaaatcaagaaaaacacctcagaaatccagaaacagaaagaataggagctctgcagtggatccagaaccacaagtaaaattggaggatgtcctcccactggcctttactcgcctttgtgaacctaaagaagcttcctacagtctcatcaggaaatatgtgtctcagtattatcctaagcttagagtggacatcaggcctcagctgttgaagaacgctctgcagagagcagtagagaggggccagttagaacagataactggcaaaggtgcttcggggacattccagctgaagaaatcaggggagaagcccctgcttggtggaagcctgatggaatatgcaatcttgtctgccattgctgccatgaatgagccgaagacctgctctaccactgctctgaagaagtatgtcctagagaatcacccaggaaccaattctaactaccaaatgcatttgctgaaaaaaaccctgcagaaatgcgaaaagaatgggtggatggaacagatctctgggaaagggttcagtggcaccttccagctctgttttccctattatccccccccagggcagttgtcctccttccccacatcctgtctgcgtcagtgcactcctcccctcccgtggagctggaagccaggcaccctgggggccatgcagaaggcgggggctgggggccgcagggcctctgactgcgggctggcccctcaccggcccaggtgcatcaccaagtttgcccagtacgtgggctccttccctgtggatgacctggacacccaggagagcgtgtggctggtgcagcagcagctgtgggcgctgaaggccgagcgtcacatgggggtggcgatcttaagccccagggcccatgtgaaggatgagggcttgagactgggcgggcctggaaggagggagggtttcttcacccctgcaggctggcaagcaggggtggggctgcccggtgggtctgatgggggcctcacactgctgcctcgccaggtgctgctgatggctcacgccctgaggcgcatactctactccacctggtgccctgccgactgccagtttgccttcatggctcgaaacccacagagcccagccagcaagctcttctgccacctctttgtgggcagccagccaggagaggtccagatcctgcacctgctgctgtgccgctctttccagctggcttacctcttgcagcaccctgaggagcgggcacagccagagccctgcccagggcccacaggggaggtgcccctgaagccactgtccagctctgggggcctggtgcgggagcccttcggccgtgatcaactctctcagaacgtccatgccctggtctcctttcggcggctgccagcagaggggctggtgggcagtgggaaggagctgccagagtcggaaggccgtgcccgccatgcccgcctggggaatccctactgctcgcccacgctggtgcgcaagaaggccattcgcagcaaggtgatccgctcgggggcctaccgcggctgcacctatgagacccagctgcagctgtcggctcgggaggcctttcctgccgcatgggaggcatggccccggggtcctggtggccactcgtgcctggtggagagcgagggcagcctgacggagaacatctgggccttcgctggcatctccaggccctgtgccctggccctgttgcggagagatgtgctgggggccttcctgctgtggcctgagctgggtgctagtggccagtggtgtctgtccgtgcgcacgcagtgcggcgtggtgccccaccaggtcttccggaaccacctgggccgctactgcttggagcacctgccggcagagttccccagcctggaggctctggtggagaaccacgcggttactgaacgtagcctcttctgtcccctcgacatgggccgcctgaaccccacctacgaggagcaggactgtgggcccccaggcaggccgccccggactctccggcccctcagccatgccaagtccgaggcagagctgcagggcctgggctaa

SEQ ID NO: 66 - DNA, 2235 bp, Homo sapiens
cacagagcctttcaattcagcttggggtgagctgcacttcaggcatggggatataatagtgtgatgaaccattcttctgaaggttcttctgaaaagctgctggtcttgggatactgtgagagcccctctcattgctctttagaagtaatttaaatttttctgctacattgtctgctcagctcgtattctggtcatagaggaacctgaagccagagaaactagacaaaaaggaacctctttcaggagctataaaagaaagggaggaatcatgtccacaattgcagctttctatggcggcaagtccattctcatcacgggggccacaggctttctgggcaaagtgctaatggagaagctgtttcgcaccagcccagacctgaaagtcatttacatccttgtgaggcccaaggctggccagacactgcagcagagggttttccagatcctagacagtaagctatttgagaaagtcaaagaagtttgtccaaatgtgcatgagaagatcagagctatttatgcagatctcaatcagaatgactttgccatcagcaaagaggacatgcaggagcttctctcctgtacaaacataatatttcactgtgcagccactgtacgctttgacgacactctcagacatgctgtgcaacttaacgtcactgccacccggcagctcttgcttatggctagtcagatgccaaagctggaagcctttatacatatctctactgcctattcaaattgtaacctgaagcacatcgatgaagttatctatccgtgccctgtggagccaaaaaaaatcattgattcccttgagtggttagacgatgctattattgacgagattacacccaagctgatcagagattggcccaatatttatacctacaccaaggccttgggagaaatggtggtgcagcaagagagcaggaacctgaacattgccatcataaggccctccattgtgggagcaacttggcaggagcctttcccaggttgggttgataatataaatggacctaatggaatcattattgcgactgggaaagggtttcttcgggccataaaagctactccaatggctgtggcagacgtaattccagttgatacagtcgtcaatctcatgctagctgtaggatggtatactgcagttcacagacctaagtcaacattagtctaccacattacatctggtaacatgaatccctgcaattggcacaaaatgggagtccaagtcttggcaacctttgaaaaaatcccatttgagagacctttcaggaggccaaatgctaattttaccagcaacagcttcacatcacagtactggaatgcggtcagccaccgggcccctgccattatctatgactgctatctgcggctcactggaaggaagcccaggatgacaaagctcatgaatcggcttttaagaactgtttccatgttggagtatttcatcaaccggagttgggaatggagcacgtacaatacagaaatgctgatgtctgagctgagtcctgaagaccagagagtattcaactttgacgtgcgccagttgaactggttggaatacattgaaaattatgttttgggagttaaaaaatacttattgaaagaggatatggctgggatcccaaaagcaaagcaacgcttaaaaaggctccgaaatattcactacctctttaatactgccctcttccttatcgcctggcgccttctcattgcaagatctcagatggctcggaatgtctggttcttcattgtaagcttctgttataaattcctctcctactttagagcatccagcacgctcaaagtttaagagcatttagccatcgccttttatctggaacctctcagatacctctaaaacagcaaactgtgattctcaagattagaaagtaacaaggaatatgcccaaactgtcaaatgtcacctgttatgtattcgtccctattccttaactatgtatttttatttcagtgagagaaggaaagttgtaaactagcccatagtcacctatattttagggaaaaaaatccaaattgtttcctaacattctattttatgcccttgcgtattaaacgtgaaagtactcccaaaaaaaaaaaaaaaaaaaaaaaaaaaaaaaaaaaaaaaaaaaaaaaaaaaaaaaaaaaaaaaaaaaaaaaaaaaaaaaaaaaaaaaaaaaaaaaaaaaaaaaaaaaaaaaaaaaaaaaaaaaaaaaaaaaaaaaaaaaaa

SEQ ID NO: 67 - DNA, 487 bp, Homo sapiens
  misc_feature (32)..(32): n is a, c, g or t.
  misc_feature (39)..(39): n is a, c, g or t.
  misc_feature (51)..(51): n is a, c, g or t.
  misc_feature (454)..(454): n is a, c, g or t.
  misc_feature (487)..(487): n is a, c, g or t.
ttttttttttgaaatgggatgtcattctgagnactcagnaaacccctgagncttgttagatggacagacatcctttccatcttatgtggatgagtgtttcttcagtgtctttagtatcaatttacccagatactgattttgaaagcctcattcacaccataaactttgttctaaacctctgtcttttacattgtccttctccaatgccttacctcttagttacgattctgaaaccaagagtacatctcaagtatgtaggctgcaatgggagctctgcttcacgactgtaggctagtgtttaatgctgagtaaaaaatgtgccttaaagggtagcctgagtcctgttcatcaaaataatcacatggctgggctgagggaccctcaaggctggatggacagtgtttcccaagtttaaacaggcccaactaaaaatttttttctcccttatttgggnttttgaggaaaccttacaaaatcctggggctan

SEQ ID NO: 68 - DNA, 366 bp, Homo sapiens
  misc_feature (249)..(249): n is a, c, g or t.
  misc_feature (278)..(278): n is a, c, g or t.
  misc_feature (306)..(306): n is a, c, g or t.
  misc_feature (327)..(327): n is a, c, g or t.
  misc_feature (344)..(344): n is a, c, g or t.
ttaaaacataaactcattcaagattaagatacttttgtaagacatgataccagccattttgtctatccccaaagaactgaggctccagggaatttaaccatgctaatgtaatctttttcacattattaactgaagaaaaatgagtgcccttgaaatattttttaagattaggaaacaaaaggcaagtcagaaggaaccgaagcaggatggtaaggtggatgcctaatgatttcccataggaacttaagnttgcctttgtttgatgagagaaatgagcngggagcattgtcgtgggtggagaagggnctttctagtggaatctttccnggggcatttttctgccnaagcattggctaactttctcaa

SEQ ID NO: 69 - DNA, 4651 bp, Homo sapiens
ggaccggaagtggggggcggaagtgcagtgggctcagcgccgactgcgcgcctctgcccgcgaaaactctgagctggctgacagctggggacgggtggcggccctcgactggagtcggttgagttcctgagggaccccggttctggaaggttcgccgcggagacaagtgagcagtctgtgccatagggattctcgaagagaacagcgttgtgtcccagtgcacatgctcgcatcgcttaccaggagtgcccgagaccctaagatgttcggagtggttttttcgcacagacccgaatagcctgcccctcagccacgctctgtgcccttctgagaacaggctgatatgcccaagatagtcctgaatggtgtgaccgtagacttccctttccagccctacaaatgccaacaggagtacatgaccaaggtcctggaatgtctgcagcagaaggtgaatggcatcctggagagccctacgggtacagggaagacgctgtgcctgctgtgcaccacgctggcctggcgagaacacctccgagacggcatctctgcccgcaagattgccgagagggcgcaaggagagcttttcccggatcgggccttgtcatcctggggcaacgctgctgctgctgctggagaccccatagcttgctacacggacatcccaaagattatttacgcctccaggacccactcgcaactcacacaggtcatcaacgagcttcggaacacctcctaccggcctaaggtgtgtgtgctgggctcccgggagcagctgtgcatccatcctgaggtgaagaaacaagagagtaaccatctacagatccacttgtgccgtaagaaggtggcaagtcgctcctgtcatttctacaacaacgtagaagaaaaaagcctggagcaggagctggccagccccatcctggacattgaggacttggtcaagagcggaagcaagcacagggtgtgcccttactacctgtcccggaacctgaagcagcaagccgacatcatattcatgccgtacaattacttgttggatgccaagagccgcagagcacacaacattgacctgaaggggacagtcgtgatctttgacgaagctcacaacgtggagaagatgtgtgaagaatcggcatcctttgacctgactccccatgacctggcttcaggactggacgtcatagaccaggtgctggaggagcagaccaaggcagcgcagcagggtgagccccacccggagttcagcgcggactcccccagcccagggctgaacatggagctggaagacattgcaaagctgaagatgatcctgctgcgcctggagggggccatcgatgctgttgagctgcctggagacgacagcggtgtcaccaagccagggagctacatctttgagctgtttgctgaagcccagatcacgtttcagaccaagggctgcatcctggactcgctggaccagatcatccagcacctggcaggacgtgctggagtgttcaccaacacggccggactgcagaagctggcggacattatccagattgtgttcagtgtggacccctccgagggcagccctggttccccagcagggctgggggccttacagtcctataaggtgcacatccatcctgatgctggtcaccggaggacggctcagcggtctgatgcctggagcaccactgcagccagaaagcgagggaaggtgctgagctactggtgcttcagtcccggccacagcatgcacgagctggtccgccagggcgtccgctccctcatccttaccagcggcacgctggccccggtgtcctcctttgctctggagatgcagatccctttcccagtctgcctggagaacccacacatcatcgacaagcaccagatctgggtgggggtcgtccccagaggccccgatggagcccagttgagctccgcgtttgacagacggttttccgaggagtgcttatcctccctggggaaggctctgggcaacatcgcccgcgtggtgccctatgggctcctgatcttcttcccttcctatcctgtcatggagaagagcctggagttctggcgggcccgcgacttggccaggaagatggaggcgctgaagccgctgtttgtggagcccaggagcaaaggcagcttctccgagaccatcagtgcttactatgcaagggttgccgcccctgggtccaccggcgccaccttcctggcggtctgccggggcaaggccagcgaggggctggacttctcagacacgaatggccgtggtgtgattgtcacgggcctcccgtaccccccacgcatggacccccgggttgtcctcaagatgcagttcctggatgagatgaagggccagggtggggctgggggccagttcctctctgggcaggagtggtaccggcagcaggcgtccagggctgtgaaccaggccatcgggcgagtgatccggcaccgccaggactacggagctgtcttcctctgtgaccacaggttcgcctttgccgacgcaagagcccaactgccctcctgggtgcgtccccacgtcagggtgtatgacaactttggccatgtcatccgagacgtggcccagttcttccgtgttgccgagcgaactatgccagcgccggccccccgggctacagcacccagtgtgcgtggagaagatgctgtcagcgaggccaagtcgcctggccccttcttctccaccaggaaagctaagagtctggacctgcatgtccccagcctgaagcagaggtcctcagggtcaccagctgccggggaccccgagagtagcctgtgtgtggagtatgagcaggagccagttcctgcccggcagaggcccagggggctgctggccgccctggagcacagcgaacagcgggcggggagccctggcgaggagcaggcccacagctgctccaccctgtccctcctgtctgagaagaggccggcagaagaaccgcgaggagggaggaagaagatccggctggtcagccacccggaggagcccgtggctggtgcacagacggacagggccaagctcttcatggtggccgtgaagcaggagttgagccaagccaactttgccaccttcacccaggccctgcaggactacaagggttccgatgacttcgccgccctggccgcctgtctcggccccctctttgctgaggaccccaagaagcacaacctgctccaaggcttctaccagtttgtgcggccccaccataagcagcagtttgaggaggtctgtatccagctgacaggacgaggctgtggctatcggcctgagcacagcattccccgaaggcagcgggcacagccggtcctggaccccactggaagaacggcgccggatcccaagctgaccgtgtccacggctgcagcccagcagctggacccccaagagcacctgaaccagggcaggccccacctgtcgcccaggccacccccaacaggagaccctggcagccaaccacagtgggggtctggagtgcccagagcagggaagcagggccagcacgccgtgagcgcctacctggctgatgcccgcagggccctggggtccgcgggctgtagccaactcttggcagcgctgacagcctataagcaagacgacgacctcgacaaggtgctggctgtgttggccgccctgaccactgcaaagccagaggacttccccctgctgcacaggttcagcatgtttgtgcgtccacaccacaagcagcgcttctcacagacgtgcacagacctgaccggccggccctacccgggcatggagccaccgggaccccaggaggagaggcttgccgtgcctcctgtgcttacccacagggctccccaaccaggcccctcacggtccgagaagaccgggaagacccagagcaagatctcgtccttccttagacagaggccagcagggactgtgggggcgggcggtgaggatgcaggtcccagccagtcctcaggacctccccacgggcctgcagcatctgagtggggtgagcctcatgggagagacatcgctgggcagcaggccacgggagctccgggcgggcccctctcagcaggctgtgtgtgccagggctgtggggcagaggacgtggtgcccttccagtgccctgcctgtgacttccagcgctgccaagcctgctggcaacggcaccttcaggcctctaggatgtgcccagcctgccacaccgcctccaggaagcagagcgtcatgcaggtcttctggccagagccccagtgagtgcccacggaggcccccagcacacccaacgtggcttgatcacctgcctgtccagctctggtgggccaagaacccacccaacagaataggccagcccatgccagccggcttggcccgctgcaggcctcaggcaggcggggcccatggttggtccctgcggtgggaccggatctgggcctgcctctgagaagccctgagctaccttggggtctggggtgggtttctgggaaagtgcttccccagaacttccctggctcctggcctgtgagtggtgccacaggggcaccccagctgagcccctcaccgggaaggaggagacccccgtgggcacgtgtccacttttaatcaggggacagggctctctaataaagctgctggcagtgcccaggaaaaaaaaaaaaaaaa

SEQ ID NO: 70 - DNA, 5622 bp, Homo sapiens
ggcagggccggaaggagtgcagcggctgccacggagctcgcagctgcggcttctgaggagtaagcggcgcggtagcgaaggccgccgaacctgcctggctagccggcgacttgagtgacgactcttttgaaacagatggtcaccatgtttagatattagcagtcccatatatgcatgtctgcatttgaaaatggaagagggaaacaacaatgaagaggtaattcacttgaacaactttcactgccatcggggacaagagtggatcaatctccgagatgggcccatcaccatatctgactcctcagatgaggaaaggattccaatgctggtcaccccagctcctcagcagcatgaagaagaggacctggatgatgatgtcatcctgacagaagatgattctgaggatgactacggtgaatttctggatcttgggcctcctggaatctctgaattcactaagccaagtggccaaacagaaagagaacccaagcctggaccgagtcataaccaagcagcaaatgacattgtcaaccccagatcagagcagaaagtcatcatcttggaagaaggtagccttctttacacagaaagcgatcctttggaaactcagaaccagtcatccgaagactcagagacagagctgttatcaaatctaggagagtcagctgctctagcagatgatcaggccatcgaagaagactgctggttagatcatccttacttccagtctctgaaccaacagccccgtgaaataacaaaccaggtcgttcctcaggaacggcagcctgaagcagaactgggccgcttgttgtttcagcatgaattcccagggcccgcttttccaaggccggaaccccagcaaggtgggatttcaggcccctcttctcctcagcctgcccatcctctaggagagtttgaagaccagcagttagcaagtgatgatgaagagccaggtccagcctttccaatgcaagaatctcaagagcccaatttggaaaacatttgggggcaagaagctgcagaggtagatcaagagctcgttgaactactagtgaaagaaacggaagcaagatttccagatgtagcaaatgggtttattgaggaaataattcattttaagaattattatgatctgaatgtactttgtaattttcttctggaaaacccagattatccaaagagagaagacagaatcattataaatcccagtagcagtctgctggccagccaagatgagacaaagttgcctaaaatagacttttttgactattctaaattgacccctcttgaccagcgctgcttcatccaagctgctgacctcctcatggccgacttcaaagtgctcagtagtcaggacatcaagtgggccctgcacgagctcaaaggacactatgcaatcacccgaaaggccttgtctgatgccattaaaaaatggcaggagctgtcaccagaaaccagtggaaaaaggaagaagagaaaacaaatgaaccagtattcttacattgatttcaagtttgaacaaggtgacataaaaatagaaaagaggatgttctttcttgaaaataagcgacgacattgtaggtcctatgaccgacgtgctctccttccagctgtgcaacaagagcaggagttctatgagcagaaaatcaaagagatggcagagcatgaagactttttgcttgccctacagatgaatgaagaacagtatcaaaaggatggccagctgattgagtgtcgctgctgctatggggaatttccattcgaggagctgacgcagtgcgcagatgctcacttgttctgcaaagagtgtctcatcagatatgcccaagaggcagtctttggatctggaaagttggagctcagctgcatggaaggcagctgcacgtgttcgttcccaaccagtgagctggagaaggtgctcccccagaccatcctgtataagtactatgagcgaaaagccgaggaggaggttgcggcagcctacgccgacgagcttgtcaggtgcccgtcctgtagctttccggctctgttggacagtgatgtgaagaggttcagctgtcctaatcctcactgccgaaaggaaacctgtaggaagtgtcagggactctggaaagaacataatggcctcacctgtgaagagctggctgaaaaagacgacatcaagtaccgtacctctattgaagaaaaaatgactgctgcccgcattagaaaatgccacaagtgtgggactggcctcatcaaatctgaaggctgcaaccgcatgtcttgccgctgtggtgcccagatgtgctacctctgtcgagtttctattaatggatatgaccatttctgccaacatccccgctcaccaggagccccttgccaggagtgttcaagatgctctctctggaccgatcccactgaagatgatgagaagcttattgaggaaatccagaaggaggctgaagaggaacagaaaagaaagaatggagagaacaccttcaaacgcattggacccccgctggagaagcctgtggagaaggtgcagagggtggaggccctcccgaggcccgttccgcagaacctgccacagccacagatgccaccctatgccttcgcgcacccacccttccccctgcctcccgtgcggcctgtgttcaacaacttcccactcaacatggggcctatcccagccccgtacgtgccccctctgcccaacgtgcgggtcaactatgacttcggtcccatccacatgcccctggagcacaacctgcccatgcactttggcccccagccgcggcatcgcttctgatggccccgaatccccattgagcagcacaaagcccgtttggggtaggagtgtggatggagaaccctcccccaaggctggtgtctgtaccattgcatcctaagtcagcttgaagggtaggctggttttcttcccacccctttcctagaagggctactgctcctggaagagtggacggatccataataaagacgtcccaaatggtggagttcggagagagctgcgatgtgaactgcccctcccctcgcatcccccaggccaccaacggcagtccttctgccttgtccatggcataggccatagaccaggtccctgctgctcacacctgggcctctcctcggagccgacccctgggtagcaaggcagccgagagcatctccctggaggggcccacggttgggccaagggcagagggggctgcacctgcgggcctgggaagcattgctcagggtggggggctgggaccatggcccgcagaggcactgccacagctgtgagggccaagatgctgtccccccatccaaaacccgtgcgccactgcagtgagtgttgagggcacctctcctcccctcttacacctactcagatgaggcagcagcagacccatctcgcggcgggggttttgttctgttgccgcctaactttctcatcctcggtctctggaaagtcaggctgagaaatcctttcccaggccaggccgctgcggtacactggatggttctgaagctggcccattgaaagagcctcttaaggcagctgggacagaggcctggtggccctgctgggcagcccaactgctgggggagacgtttctgccaccctgggtgatgagcagcttttcccccctggctttctgggggaggagtgggcctccttagggagacaggtgaccctgggtgccacccctgccccgtgtgtgccccgggtgttctcagtggttgctgaaggcaggtagagggtgctgtccagtatcccccatgtgaaggtcacttcccttctcatggagtcagctgagcatcagctcagccctgccatgtccccactcaccctcctcgcctcctgtccggccctgggtttctagcggtgcctgaggcatcactctggcccattgacagatgagaggtctgaagccttcctggccacaggcatcactttctcctcctcctcatgccctgccttgtccttgtcgtgttgccatggggttctgagaggctgggagttcacagacctcagacacagctgagtccgacaaccattggggtggggctgcatcagtctccggagtggcccgccacctcctgaagcagggcctggcccacccaaggtgcctggggcaggcgggcaccgtcattcgctgccattggcttctcagatgtatttcaaggactaaagtgggctctaagatctaagatggcccggcgcggtggctcccgcctgtaatcccagcactttgggaggccgaggcgggcggatgagttgaggtcgggagtttgagtccccgtctctactaaaaatacaaaattagccggacaaggtggcgcatgcctataatcccaggtactcaggaggctgaggcaggagaatcacttgaacctgggaggcagaggttgcagtgagccaagattgtgccactgcactccagcctgagcaacaaaagcaaaactctatctttaaaaaaaaaaaaaaaaaaactaagatacccattctttctgcctttgcccaggatggaggctttgaagacaggtggtcacctggacctggggtaagggtgcgcagggaggccgggcttgggggcagcctgctgctatgtccttgctggcgcccatacctgttggactgcctgaactttgctactagcctgaacgacagtgccttggaaaggcaggctccatgcggcagcaacaggattgtcttcggtaccttaaatatgctccctgtgcttccccagggaggatctctgggagcagagggcggctgtagacatcacagctgaagaggtgacctcaggccctgggagcctcagctccctctgccctgtaccctaggcacgtggctccagcaagagccccaggcaggacaaagggagcaggcagcagctgcagaaacagccctagacaggtgctggcctcaaccctggcaggggagggggagcccagagtgatgtttctcctaaggccaaaccccaggggtgggtcatttgagaggagttccagctgttctggccacactgggctggtggggaaggagcggcggcctctttccttggagggtccctgattcctgaggatcctccccgagccaggcacgggggaccacagggctgccgtgagcacccaccctggttctccaggcccctctgtccagaggcagggcctgaacctcgggctcctgcctggaccagtgacagcattggggagagaagcactgggggtcttcagaccagccagcaaggggccgtgccagtgcccagagagcaggtcagacaacaggcaaccctgaggcagctggctccctctctctgccctgcagggcttgccgcagggcgtgaggctccccagccacagccccctcttacttgccttaaaactggagagaggaatctagtatttgcacttagcaaaatatttaaaaactgaaaaaaatgtgcatgatctgtcactttgtataaaaacaagaaacgattagttcattaaactttttctttaccttctggtagtaaaaatagataaaataattccgtttcaactactgtgtgtaaaaagcctgtatcatatgtaactgggacttttgtaaataaatgtttgtgcgctctgctcaaaaaaaaaaaaaaaaaa

SEQ ID NO: 71 - DNA, 5059 bp, Homo sapiens
ctggttctcaacttcttttgaaataatgttcatagagaaggagggctgtctgagattcgagggaaacaagctctcaggacttccggtcgccatgatggctgtgggcggtaaacgcggttagtgcaagcatctgggccatcttcaatggtaaaaaagatacagtaaagacataaataccacatttgacaaatggaaaaaaaggagtgtccagaaaagagtagcagcagtgaggaagagctgccgagacgggtatacagggagctaccctgtgtttctgagaccctttgtgacatctcacattttttccaagaagatgatgagacagaggcagagccattattgttccgtgctgttcctgagtgtcaactatctgggggggacattcccaggagacatttgctcagaagagaatcaaatagtttcctcttatgcttctaaagtctgttttgagatcgaagaagattataaaaatcgtcagtttctggggcctgaaggaaatgtggatgttgagttgattgataagagcacaaacagatacagcgtttggttccccactgctggctggtatctgtggtcagccacaggcctcggcttcctggtaagggatgaggtcacagtgacgattgcgtttggttcctggagtcagcacctggccctggacctgcagcaccatgaacagtggctggtgggcggccccttgtttgatgtcactgcagagccagaggaggctgtcgccgaaatccacctcccccacttcatctccctccaaggtgaggtggacgtctcctggtttctcgttgcccattttaagaatgaagggatggtcctggagcatccagcccgggtggagcctttctatgctgtcctggaaagccccagcttctctctgatgggcatcctgctgcggatcgccagtgggactcgcctctccatccccatcacttccaacacattgatctattatcacccccaccccgaagatattaagttccacttgtaccttgtccccagcgacgccttgctaacaaaggcgatagatgatgaggaagatcgcttccatggtgtgcgcctgcagacttcgcccccaatggaacccctgaactttggttccagttatattgtgtctaattctgctaacctgaaagtaatgcccaaggagttgaaattgtcctacaggagccctggagaaattcagcacttctcaaaattctatgctgggcagatgaaggaacccattcaacttgagattactgaaaaaagacatgggactttggtgtgggatactgaggtgaagccagtggatctccagcttgtagctgcatcagcccctcctcctttctcaggtgcagcctttgtgaaggagaaccaccggcaactccaagccaggatgggggacctgaaaggggtgctcgatgatctccaggacaatgaggttcttactgagaatgagaaggagctggtggagcaggaaaagacacggcagagcaagaatgaggccttgctgagcatggtggagaagaaaggggacctggccctggacgtgctcttcagaagcattagtgaaagggacccttacctcgtgtcctatcttagacagcagaatttgtaaaatgagtcagttaggtagtctggaagagagaatccagcgttctcattggaaatggataaacagaaatgtgatcattgatttcagtgttcaagacagaagaagactgggtaacatctatcacacaggctttcaggacagacttgtaacctggcatgtacctattgactgtatcctcatgcattttcctcaagaatgtctgaagaaggtagtaatattccttttaaattttttccaaccattgcttgatatatcactattttatccattgacatgattcttgaagacccaggataaaggacatccggataggtgtgtttatgaaggatggggcctggaaaggcaacttttcctgattaatgtgaaaaataattcctatggacactccgtttgaagtatcaccttctcataactaaaagcagaaaagctaacaaaagcttctcagctgaggacactcaaggcatacatgatgacagtcttttttttttttgtatgttaggactttaacactttatctatggctactgttattagaacaatgtaaatgtatttgctgaaagagagcacaaaaatgggagaaaatgcaaacatgagcagaaaatattttcccactggtgtgtagcctgctacaaggagttgttgggttaaatgttcatggtcaactccaaggaatactgagatgaaatgtggtaaatcaactccacagaaccaccaaaaagaaaatgagggtaattcagcttattctgagacagacattcctggcaatgtaccatacaaaaaataagccaactctgacatttggattctaccatagactctgtcattttgtagccatttcagctgtcttttgattaatgttttcgtggcacacatatttccatccttttatgtttaatctgtttaaaacaagttcctagtagacaccatctggttgagtcagttttttttatggtgtattttgaacccattctgatagtctcttttaactggaagatttcaattacttacgttaatgtaattattaatatgttaggatttatcctcagtcagccagtttgttatgtcttttctattctactgttatcacatttgtaccacttaaagtggaatctaggcactttatcaccatttagatcctattaccttttctcatctaggatatagttatcttctacataatctttctgtatcttaaaacccatcaataaattattatatattttctacttttaatcactcagaagatttaaaaaactcatgagaagagtaatctgttatgtttttccagatatttaccatttctgttgctcttccttcattattttccaaatttcgttctgcaaatttccacttcttctgatagacgttttttagttcttttagagtggttctgataggtacagattctcttattttttgcttcctctgaggacatctttttctcaccttcattctcagtgatgttttttgcttgtagtatttttagttgacattgttttctgttcagcagtttccttttagcttccgtatttcctgatgagaaatctgcagtcattcaaattgttgtttccctgtatgtagtgtgtcatttttctgtcagatttcaaggtatttatctttagtttttagccatttcattatgttggggatgagtttccttgttttattccctttggaatttgctccaattcataaatttgcagttttatgtcttttaccaaacttagaggttttcagcctaatttctaaaaatactttttattagcctgattttcatctttataggaaatagtttaagtgatgacaagttccaatagcttatatgcccagaaggccttcaaaataagaattttgaaagaatacagaaaacaaacttttatatccttctcatgtcttctactgtaaaattcatatgctttgctactctaaacctagtttgaaatcaacagtcttgagaatagatgaaaattttgatgaatagtggaattcttttaaatggaaacctcttacatgtgattttccttgccatctagaaataaaccatagtatttatgttgaatcaatcaatattatattttgtttttttcctcctcttctgagactcttattgtggaaatgttagacttttatgttttcctaaatgtccctgatattctacttatttagaacatcttttcattttttccattattctgattgggtaattttaatttgtctattttcaaatttgctggagtgttcacctgttgttgtctgtgtcgtcccactgagtgcattcaccaccttttaaattttggtcactgtatgtatcagttctaaaatttccattttgttctctatattttaaatttcttggcttatattctattttcctgcaaatgtgtcagcatttgcttgtttgagctttttttttttcaagacagggtctcaactctgttacccaggctggagtgcagtggtgcgatctcagctcactgcaacctctgcctcctggttcaagcgattattgtgcctcagcctcctgagtagctgggattacaggcatgcaccaccacagcccagctaattttttgtatttttagtagagacagagttttgctatgttggccaggctggttttgaactcctggcctcaagtgatccacccacctcagcctcccaaagtgctgggattacaggccactacacctggcacatttgagtattttttttttttttttttttttgagatggagtctcgctctgtcatctaggctggagtgcagtggtgtgatctcagctcactgcagcctctgtctcccgggctcaagcgattctcttgcctcagcctcctgagtagctaggactacaggtgcatgccaacacgcccggctaatttttttaaaaaatatttttagtagagacagggtttcaccattttggccaggatggtctcgatctcctgacctcatgatccacccgcctcggccttccaaagtgctgggattacaggcatgagccaccgtgcctggcctcatttgagtatttttataatgtctcttttaaagtctttgtcagataattccactgtacatgttattcagtgtttggtgtccactgagttgtcatttgccagacaagtggagatttttgcagctcatccttgtattctcagtagttccgatatgtaccctcgacatgtgaatgttatcttatgagactctgttttatttgtatccaacagaagatgtttattatttatttggctttctgtgaactgaggtcttaatatcagctcattttaaaagtctttgcagtggtattcggatctatcctgtgtgtgcctatgagattgggtgcagtgtatcctgttagctccattctcagggcgtttgaatgtgaattaggaccagcgcaatgaatgctcaagttggggttgggcgttagaattcataaaagtctttatatgctcag

SEQ ID NO: 72 - DNA, 5767 bp, Homo sapiens
gagggaggagagttcacttttacttcagtgtcagcgcgcggcggccgtggctggctctggcgagagagcaccgagggagtgggtcgcagatcttcgggcggctaggggaaatcggcgagaggcgggatccgagcgcgccggcggggcgcagagcccgcgagcctggccagcgagggtagccgcggggggcgcgccccgggcgggcccccggagacgcgcaggatgccacacgaagagctgccgtcgctgcagagaccccgctatggctctattgtggacgatgaaaggctctctgcagaggagatggatgagaggaggcggcagaacattgcttatgaatatctgtgccacttagaggaagccaaaaggtggatggaagtttgcttagttgaagaattgccaccaaccactgaattggaagaagggctccggaatggagtttaccttgcaaagttagccaagttctttgccccgaaaatggtatcagagaaaaagatctatgatgtggaacaaacacgttataagaagtctggccttcattttcgacacacagataataccgtccagtggttaagagcgatggagtctattggtctacccaagatattttatccagaaacaacagatgtctatgatcggaaaaacataccaagaatgatatattgcattcacgcactgagtttgtatctgttcaaactaggaatagcaccccagatccaggatttgttgggcaaagtagacttcacagaggaggaaatcagtaatatgagaaaagaacttgagaaatatggaatacagatgccatctttcagcaaaataggtggtattctggccaatgaactgtccgtggatgaagctgcattacatgctgcagttatagccattaatgaagcagttgaaaaaggaatagcagagcaaaccgttgtaacactaagaaacccaaatgcggttttaactttagtggatgacaaccttgcaccagaatatcagaaagaactctgggatgccaaaaagaaaaaagaggaaaatgcaagactgaagaatagctgtatttcagaagaagaaagagatgcttatgaagaactgctgacacaagcagaaatccaaggcaatattaataaagtcaacaggcaggctgcagtggaccatatcaatgctgtcattccggaaggtgaccccgagaatacgctgcttgcactgaagaaaccagaggcccagctgcctgctgtttatccctttgctgctgccatgtatcagaacgaacttttcaacctccagaaacagaacaccatgaactacttggcccacgaggagcttttgattgctgtggaaatgttgtctgctgttgctttactaaaccaggccttggaaagcaacgatcttgtgtctgtgcagaatcaactcagaagccccgcaataggcttaaacaatctggacaaggcatatgtggaacgttatgcaaacacactactctctgttaaactagaagttttatcccaagggcaagataacttaagctggaatgaaattcagaattgtattgatatggttaatgctcaaattcaagaagaaaatgaccgagttgtagctgtagggtacatcaatgaagctattgatgaagggaatcctttgaggactttagaaactttgctcctacctactgcgaatattagtgatgtggacccagcccatgcccagcactaccaggatgttttataccatgctaaatcacagaaactcggagactctgagagtgtttccaaagtgctttggctggatgagatacagcaagccgtcgatgaggccaacgtggacgaggacagagcaaaacaatgggttactctggtggttgatgttaatcagtgtttggaaggaaaaaaatcaagtgatattttgtctgtattgaagtcttccacttctaatgcaaatgacataatcccggagtgtgctgacaaatactatgatgcccttgtgaaggcaaaagagctcaaatctgaaagagtgtctagtgacggttcatggctcaaactcaacctgcacaaaaaatatgactactattacaacactgattcaaaagagagttcctgggtcacacctgaatcatgcttctataaagaatcatggctcacaggaaaagaaatcgaggacattattgaggaagtcacagtaggttacattcgtgagaatatatggtctgcttcagaagagttgcttcttcgctttcaagccacaagctcaggacccatccttagggaagagtttgaagctagaaaatcatttttgcatgaacaagaagagaatgtggtcaaaatacaggctttttggaaaggatataaacaacggaaggagtatatgcacaggcggcaaacgttcattgataatactgattctgttgtgaagattcagtcctggttccgaatggcaactgcaagaaagagctatctttcaagactacagtatttcagagatcataataatgaaattgtgaaaatacagtcactgttgagagcgaacaaagctagagatgactacaaaacattggttggctctgaaaacccaccattaacagtaattcgcaaatttgtatacctgctggaccaaagtgatttggatttccaggaggaactagaggttgcacgattaagggaagaagtagtgaccaagatcagggccaatcaacagctggaaaaagacctgaacctgatggacatcaagattggactgctggtgaagaacaggatcacactagaggatgtaatttcacacagtaaaaagctgaacaagaaaaaaggaggagaaatggaaatactgaataacaccgacaaccaaggaataaaaagtttgagtaaggagaggagaaaaacactagaaacatatcagcagctgttttaccttttacagaccaaccctttatacttggctaagctgattttccagatgccacagaacaagtccactaaatttatggatactgttattttcacactatataattatgcctctaatcagcgagaagaatatctacttctcaagctttttaaaactgctctggaggaagaaataaaatcaaaagtggaccaggtacaggacatagttactggtaaccctacagtcatcaagatggtcgtcagcttcaatagaggtgcccggggacagaacaccctgcgccaactcctggctccagtggtaaaagagatcatcgacgacaagtcgctgattatcaacacaaaccctgtagaggtgtacaaggcttgggtgaaccaactagaaacacagactggagaggccagcaagttgccttatgatgtgaccacagaacaagctctaacatacccagaagtgaaaaataaactggaggcttccattgagaacctgagaagggtcaccgacaaagtcctgaattctatcatttcttcccttgatctactgccttatggattgaggtatatagccaaagtactgaagaattcgatccatgagaaattccccgatgcaacagaagatgagctattaaagattgttggaaacctcctgtactatcggtacatgaatccagccattgtagctccagatggctttgatatcatcgacatgacagctggaggtcagataaattctgaccaaaggagaaacttaggatcagtggccaaggttcttcagcacgcagcctccaacaagctgtttgaaggagaaaatgagcatctctcatctatgaacaattatttatcagagacgtatcaggaattcaggaaatatttcaaagaagcatgtaatgtccctgagccagaagagaagtttaatatggacaaatacacagacctggtgacagtcagcaaaccagtcatttatatttcaattgaagaaatcatcagcacacactcactcctgttggaacaccaggatgcaattgcccctgagaaaaatgacttactgagtgaattgctggggtcgctgggagaggtgccaaccgtggaatcttttcttggggaaggagcagttgaccccaatgaccctaacaaggcaaatacactaagtcagctttcaaagaccgagatttctcttgtcttgacaagcaaatatgacatagaggacggtgaagctatagatagccgaagcctcatgataaagaccaagaagctgataattgatgtgatccggaaccagccagggaacacattgacagaaatcttagagacaccagcaactgcgcaacaggaggtagaccatgccacggacatggtgagccgtgcaatgatagattccaggactccagaagaaatgaagcatagccaatctatgattgaagatgcacagctgcctcttgagcagaagaagaggaaaatccagaggaatcttcggacgttggaacagactggacacgtgtcatccgaaaataaataccaagacattctcaatgagattgccaaggatattcgaaatcaaagaatctatcgtaagcttcgaaaagctgaattggcaaaacttcagcagaccctgaatgcacttaacaagaaggcagcattttatgaagagcaaatcaattattatgacacctacataaagacttgtttagacaacttaaaaagaaaaaatactcggagatcaattaaactagatggaaaaggagaacccaaaggggcgaagagagcgaagccagtgaagtacactgcagcaaagctgcatgagaaaggtgtcctgctagatatagatgatcttcaaacaaaccagtttaagaatgttacatttgatatcatagctactgaagatgtaggcattttcgatgtaagatcaaaattccttggtgttgagatggaaaaggtgcaactcaatattcaggatttacttcagatgcaatatgaaggagtagctgtaatgaaaatgtttgataaggttaaagtgaatgtaaaccttctcatatacctgctgaacaagaagttctatggaaagtgaagtgcctacagaaatttcttggattctgtatcatctggattaggaaatgaatttgtttaatatttttgtttttaaacatgattgaaatcactgcttataaatgtgtgattttttttaaatgaccaaaactgttctgaagaatgtacccaggtgcctttttgctaatttgatactataatagaatgagacataaaatgaattaatggaaacatatccacactgtactgtgatataggtactctgatttaaaactttggacatcctgtgatctgttttaaagttggggggtgggaaatttagctgactagggacaaacatgtaaacctattttcctatgaaaaaagttttaaatgtcccacttgaataacgtaattcttcatagtttttttaatctatggataaatggaaacctaattatttgtaatgaattatttagacagttctaagccctgtcttctgggagttatcaattttaaagagaacttttgtgcaattcaaatgaagtttttataagtaattgaaaatgacaacacaataacactttctgtataaaagtatatattttatgtgatttattcctactaaatgaaagtgcactactgcctcatgtaaagactcttgcacgcagagcctttaagtgactaaggaacaacatagatagtgagcatagtccccacctccacccctcacaatttatttgaatacttcaattgtgcctctcaattttttgtaatgctaaaaaatcagtatctagatggtttttaaatgtattctctggaaattgttttatgtaaaataaatgttacttaattccatt

SEQ ID NO: 73 - DNA, 522 bp, Homo sapiens
  misc_feature (499)..(499): n is a, c, g or t.
aactcacaaaaagtattcatttttcctcatgattttaatgggcttttggtagttttaataaaacagtgttggggctctgttttatttataacatttagagcttatgttagcctattaatgtcatttatgctgaataaagtggaaatatttcatggaatgtggaataatgtaagtcatttttatatctttctaaataaaaaggattgattaaacagaaatacctataaactattcttttggaacttccgtaatgggactatcagggtgtcttgcacctagtaagtgttcaatatgtactccttgaatatgtaaatataaataaacccagaactaggccattaggtgaactagacatgaggtgaaatggagcattcgtggtgggtgccgctcttctgggagaacaatgggcagaagttcatttgtccctgtctataggacttttggtgagacaggatcacctccatgcattggcaggaagaaggaagacagagtgccccanaccagcttataagtattgtgcac

SEQ ID NO: 74 - DNA, 2900 bp, Homo sapiens
atgagtgtcagaagtgtgaagggtgcctgttctgaatcccagagcctcctctccctctgtgaggctggcaggtgaggaagggtttaacctcactggaaggaatccctggagctagcggctgctgaaggcgtcgaggtgtgggggcacttggacagaacagtcaggcagccgggagctctgccagctttggtgaccttgggccgggctgggagcgctgcggcgggagccggaggactatgagctgccgcgcgttgtccagagcccagcccagccctacgcgcgcggcccggagctctgttccctggaactttgggcactgcctctgggacccctgccggccagcaggcaggatggtgcttgcctcgtgccccttggtgcccgtctgctgatgtgcccagcctgtgcccgccatgccgccctccatctcagctttccaggccgcctacatcggcatcgaggtgctcatcgccctggtctctgtgcccgggaacgtgctggtgatctgggcggtgaaggtgaaccaggcgctgcgggatgccaccttctgcttcatcgtgtcgctggcggtggctgatgtggccgtgggtgccctggtcatccccctcgccatcctcatcaacattgggccacagacctacttccacacctgcctcatggttgcctgtccggtcctcatcctcacccagagctccatcctggccctgctggcaattgctgtggaccgctacctccgggtcaagatccctctccggtacaagatggtggtgaccccccggagggcggcggtggccatagccggctgctggatcctctccttcgtggtgggactgacccctatgtttggctggaacaatctgagtgcggtggagcgggcctgggcagccaacggcagcatgggggagcccgtgatcaagtgcgagttcgagaaggtcatcagcatggagtacatggtctacttcaacttctttgtgtgggtgctgcccccgcttctcctcatggtcctcatctacctggaggtcttctacctaatccgcaagcagctcaacaagaaggtgtcggcctcctccggcgacccgcagaagtactatgggaaggagctgaagatcgccaagtcgctggccctcatcctcttcctctttgccctcagctggctgcctttgcacatcctcaactgcatcaccctcttctgcccgtcctgccacaagcccagcatccttacctacattgccatcttcctcacgcacggcaactcggccatgaaccccattgtctatgccttccgcatccagaagttccgcgtcaccttccttaagatttggaatgaccatttccgctgccagcctgcacctcccattgacgaggatctcccagaagagaggcctgatgactagaccccgccttccgctcccaccagcccacatccagtggggtctcagtccagtcctcacatgcccgctgtcccaggggtctccctgagcctgccccagctgggctgttggctgggggcatgggggaggctctgaagagatacccacagagtgtggtccctccactaggagttaactaccctacacctctgggccctgcaggaggcctgggagggcaagggtcctacggagggaccaggtgtctagaggcaacagtgttctgagcccccacctgcctgaccatcccatgagcagtccagcgcttcagggctgggcaggtcctggggaggctgagactgcagaggagccacctgggctgggagaaggtgcttgggcttctgcggtgaggcaggggagtctgcttgtcttagatgttggtggtgcagccccaggaccaagcttaaggagaggagagcatctgctctgagacggatggaaggagagaggttgaggatgcactggcctgttctgtaggagagactggccagaggcagctaaggggcaggaatcaaggagcctccgttcccacctctgaggactctggaccccaggccataccaggtgctagggtgcctgctctccttgccctgggccagcccaggattgtacgtgggagaggcagaaagggtaggttcagtaatcatttctgatgatttgctggagtgctggctccacgccctggggagtgagcttggtgcggtaggtgctggcctcaaacagccacgaggtggtagctctgagccctccttcttgccctgagctttccggggaggagcctggagtgtaattacctgtcatctgggccaccagctccactggcccccgttgccgggcctggactgtcctaggtgaccccatctctgctgcttctgggcctgatggagaggagaacactagacatgccaactcgggagcattctgcctgcctgggaacggggtggacgagggagtgtctgtaaggactcagtgttgactgtaggcgcccctggggtgggtttagcaggctgcagcaggcagaggaggagtacccccctgagagcatgtgggggaaggccttgctgtcatgtgaatccctcaatacccctagtatctggctgggttttcaggggctttggaagctctgttgcaggtgtccgggggtctaggactttagggatctgggatctggggaaggaccaacccatgccctgccaagcctggagcccctgtgttggggggcaaggtgggggagcctggagcccctgtgtgggagggcgaggcgggggagcctggagcccctgtgtgggagggcgaggcgggggatcctggagcccctgtgtcggggggcgagggaggggaggtggccgtcggttgaccttctgaacatgagtgtcaactccaggacttgcttccaagcccttccctctgttggaaattgggtgtgccctggctcccaagggaggcccatgtgactaataaaaaactgtgaaccct

SEQ ID NO: 75 - DNA, 3365 bp, Homo sapiens
agcatccggagcggagctgcagcagcgccgccttttgtgctgcggccgcggagcccccgagggcccagtgttcaccatcataccaggggccagaggcgatggcttgcctccatgagacccgaacaccctctccttcctttgggggctttgtgtctaccctaagtgaggcatccatgcgcaagctggacccagacacttctgactgcactcccgagaaggacctgacgcctacccatgtcctgcagctacatgagcaggatgcagggggcccagggggagcagctgggtcacctgagagtcgggcatccagagttcgagctgacgaggtgcgactgcagtgccagagtggcagtggcttccttgagggcctctttggctgcctgcgccctgtctggaccatgattggcaaagcctactccactgagcacaagcagcagcaggaagacctttgggaggtcccctttgaggaaatcctggacctgcagtgggtgggctcaggggcccagggtgctgtcttcctggggcgcttccacggggaggaggtggctgtgaagaaggtgcgagacctcaaagaaaccgacatcaagcacttgcgaaagctgaagcaccccaacatcatcactttcaagggtgtgtgcacccaggctccctgctactgcatcctcatggagttctgcgcccagggccagctgtatgaggtactgcgggctggccgccctgtcaccccctccttactggttgactggtccatgggcatcgctggtggcatgaactacctgcacctgcacaagattatccacagggatctcaagtcacccaacatgctaatcacctacgacgatgtggtgaagatctcagattttggcacttccaaggagctgagtgacaagagcaccaagatgtcctttgcagggacagtagcctggatggcccctgaggtgatccgcaatgaacctgtgtctgagaaggtcgacatctggtcctttggcgtggtgctatgggaactgctgactggtgagatcccctacaaagacgtagattcctcagccattatctggggtgtgggaagcaacagtctccatctgcccgtgccctccagttgcccagatggtttcaagatcctgcttcgccagtgctggaatagcaaaccacgaaatcgcccatcattccgacagatcctgctgcatctggacattgcctcagctgatgtactctccacaccccaggagacttactttaagtcccaggcagagtggcgggaagaagtaaaactgcactttgaaaagattaagtcagaagggacctgtctgcaccgcctagaagaggaactggtgatgaggaggagggaggagctcagacacgccctggacatcagggagcactatgaaaggaagctggagagagccaacaacctgtatatggaacttaatgccctcatgttgcagctggaactcaaggagagggagctgctcaggcgagagcaagctttagagcggaggtgcccaggcctgctgaagccacacccttcccggggcctcctgcatggaaacacaatggagaagcttatcaagaagaggaatgtgccacagaagctgtcaccccatagcaaaaggccagatatcctcaagacggagtctttgctccctaaactagatgcagccctgagtggggtggggcttcctgggtgtcctaaggcccccccctcaccaggacggagtcgccgtggcaagacccgtcaccgcaaggccagcgccaaggggagctgtggggacctgcctgggcttcgtacagctgtgccaccccatgaacctggaggaccaggaagcccagggggcctaggagggggaccctcagcctgggaggcctgccctcccgccctccgtgggcttcatcatgacctcctgctccgcaaaatgtcttcatcgtccccagacctgctgtcagcagcactagggtcccggggccggggggccacaggcggagctggggatcctggctcaccacctccggcccggggtgacaccccaccaagtgagggctcagcccctggctccaccagcccagattcacctgggggagccaaaggggaaccacctcctccagtagggcctggtgaaggtgtggggcttctgggaactggaagggaagggacctcaggccggggaggaagccgggctgggtcccagcacttgaccccagctgcactgctgtacagggctgccgtcacccgaagtcagaaacgtggcatctcatcggaagaggaggaaggagaggtagacagtgaagtagagctgacatcaagccagaggtggcctcagagcctgaacatgcgccagtcactatctaccttcagctcagagaatccatcagatggggaggaaggcacagctagtgaaccttcccccagtggcacacctgaagttggcagcaccaacactgatgagcggccagatgagcggtctgatgacatgtgctcccagggctcagaaatcccactggacccacctccttcagaggtcatccctggccctgaacccagctccctgcccattccacaccaggaacttctcagagagcggggccctcccaattctgaggactcagactgtgacagcactgaattggacaactccaacagcgttgatgccttgcggcccccagcttccctccctccatgaaagccactcgtattccttgtacatagagaaatatttatatggattatatatatatacatatatatatatatatgcgccacataatcaacagaaagatggggctgtcccagccgtaagtcaggctcgagggagactgatcccctgaccaattcacctgataaactctagggacactggcagctgtggaaatgaatgaggcacagccgtagagctgtggctaagggcaagccccttcctgccccaccccattccttatattcagcaagcaacaaggcaatagaaaagccagggttgtctttatattctttatccccaaataatagggggtggggggaggggcggtgggaggggcaggagagaaaaccacttagactgcacttttctgttccgtttactctgtttacacattttgcacttgggaggagggaggctaaggctgggtcctcccctctgaggtttctcaggtggcaatgtaactcatttttttgtcccaccatttatcttctctgcccaagccctgtcttaaggcccagggggaggttaggagactgatagcatgtgatggctcaggctgaagaaccggggtgctgtttaagtccctgcttttatcctggtgcctgattggggtggggactgtcctactgtaacccctgtgaaaaaccttgaaatataacactccatgcagga

SEQ ID NO: 76 - DNA, 6408 bp, Homo sapiens
tttgtccatgtctcggacagagcctgggaagctgccagtgagatttcagagaccaagagcgcgaaggggcgggcgatgtggcaatccgtctgggatgtgaaaagcgtggagcgcatttagaggaattcgacgaaaacacaggaaatcactcctctcccgctcctgggcgccgctgccactggggcagaggactgggaaccgcggcagcgggataagtggcccagccagagagcgcagctcccgcgcccggtcctgccctgcgaaccagcgcggccccctggcgctgaggctgctccggccatggcccctcggccccgcgcccgcccaggggtcgctgtcgcctgctgctggctcctcactgttgttctacgctgctgcgtatcattcaatgttgatgtgaaaaattcaatgactttcagcggcccggtggaagacatgtttggatatactgttcaacaatatgaaaatgaagaaggaaaatgggtgcttattggttctccgttagttggccaacccaaaaacagaactggagatgtctataagtgtccagttgggagaggtgaatcattaccttgtgtaaagttggatctaccagttaatacatcaattcccaatgtcacagaagtaaaggagaacatgacatttggatcaactttagtcaccaacccaaatggaggatttctggcttgtgggcccttatatgcctatagatgtggacatttgcattacacaactggaatctgttctgacgtcagccccacatttcaagtcgtgaattccattgcccctgtacaagaatgcagcactcaactggacatagtcatagtgctggatggttccaacagtatttacccatgggacagtgttacagcttttttaaatgaccttcttgaaagaatggatattggtcctaaacagacacaggttggaattgtacagtatggagaaaacgtgacccatgagttcaacctcaataagtattcttccaccgaagaggtacttgttgcagcaaagaaaatagtccagagaggtggccgccagactatgacagctcttggaatagacacagcaagaaaggaggcattcacggaagcccggggtgcccgaagaggagttaaaaaagtcatggttattgtgacagatggagagtctcatgacaatcatcgactgaagaaggtcatccaagactgtgaagatgaaaacattcaacggttttccatagctattcttggcagctataaccgaggaaatttaagcactgaaaaatttgtggaggaaataaaatcaattgcaagtgaacccactgaaaagcatttcttcaatgtctctgatgaattggctctagtcaccattgttaaaactctgggagaaagaatatttgccctggaagccacagctgaccagtcagcagcttcatttgaaatggaaatgtctcagactggcttcagtgctcattattcacaggactgggtcatgcttggagcagtaggagcctatgattggaatggaacagttgtcatgcagaaggctagtcaaatcataatccctcgaaacacaacctttaatgttgagtctaccaaaaagaatgaaccgcttgcttcttatttaggttacactgtaaactctgctactgcttcttctggagatgtgctctatattgctggacagcctcggtacaatcatacaggccaggtcattatctacaggatggaagatggaaacatcaaaattctccagacgctcagtggagaacagattggttcctactttggcagtattttaacaacaactgacattgacaaggattctaatactgacattcttctagtcggagcccctatgtacatgggaacagagaaggaggagcaaggaaaagtgtatgtgtatgctctcaatcagacaaggtttgaatatcaaatgagcctggaacctattaagcagacgtgctgttcatctcggcagcacaattcatgcacaacagaaaacaaaaatgagccatgcggggctcgttttggaactgcaattgctgctgtaaaagacctcaatcttgatggatttaatgacatcgtgataggagctccgctggaagatgatcacgggggagctgtgtacatttatcatggaagtggcaagactataaggaaagagtatgcacaacgtattccatcaggtggggatggtaagacactgaaattttttggccagtctatccacggagaaatggatttaaatggtgacggtctgacagatgtgactattgggggccttggtggtgctgccctcttctggtcccgagatgtggccgtagttaaagtgaccatgaattttgagccaaataaagtgaatattcaaaagaaaaactgccatatggagggaaaggaaacagtatgcataaatgctacagtgtgttttgatgtgaaattaaagtctaaagaagacacgatttatgaagctgatttgcagtaccgtgtcaccctagattcactaagacaaatatcacgaagttttttctctggaactcaagagagaaaggttcaaaggaacatcacagttcgaaaatcagaatgcactaagcactccttctacatgttgacaagcatgactttcaggactctgtgagaataacgttggactttaatcttaccgatccagaaaatgggcctgttcttgatgattctctaccaaactcagtacatgaatatattccctttgccaaagattgtggaaataaggaaaaatgtatctcagacctcagcctgcatgtcgccaccactgaaaaggacctgctgattgtccgatcccagaatgataagttcaacgttagcctcacagtcaaaaatacaaaggacagtgcctataacaccaggacaatagtgcattattctccaaatctagttttttcaggaattgaggctatccaaaaagacagttgtgaatctaatcataatatcacatgtaaagttggatatcccttcctgagaagaggagagatggtaactttcaaaatattgtttcagtttaacacatcctatctcatggaaaatgtgaccatttatttaagtgcaacaagtgacagcgaagaacctcctgaaaccctttctgataatgtagtaaacatttctatcccggtaaaatatgaagttggactacagttttacagctctgcaagtgaataccacatttcaattgctgccaatgagacagtccctgaagttattaattctactgaggacattggaaatgaaattaatatcttctacttgattagaaaaagtggatcttttccaatgccagagcttaagctgtcaatttcattccccaatatgacatcaaatggttaccctgtgctgtacccaactggattgtcatcttctgagaatgcaaactgcagaccccatatctttgaggatcctttcagtatcaactctggaaagaaaatgactacatcaactgaccatctcaaacgaggcacaattctggactgcaatacatgtaaatttgctaccatcacatgtaatctcacttcttctgacatcagccaagtcaatgtttcgcttatcttgtggaaaccaacttttataaaatcatatttttccagcttaaatcttactataaggggagaacttcggagtgaaaatgcatctctggttttaagtagcagcaatcaaaaaagagagcttgctattcaaatatccaaagatgggctaccgggcagagtgccattatgggtcatcctgctgagtgcttttgccggattgttgctgttaatgctgctcattttagcactgtggaagattggattcttcaaaagaccactgaaaaagaaaatggagaaatgaaatattttatgaaagaaaataataacaattattcaataatctatcctcaggtttgcctcaaatatgtgacaagaaatgtataattcatgacatagtcatgtaactatgtaatccatcagggattcattacttggaaaatgacaggtcatgcattatccaaaaacaataccaaaaagacatattttataaaatgacaaaaaatattttacataattactcatttttgttgagtaagcaaaattacaaagtgtttttaaaaaaacctgtacaaatatgtttatgtattaaatcaccatccaaaatatttaaggaatatataaaaagatttttatgatcatagaaacatctattttcaaaacaatataaattaagcttttccccttgattcctgttggatatccatgttcagcatgacagtcagcactcgtaaatgccaagaaaagaattacctgaaaaagatcatttctccctattcaaatgagaatattttcccttggtagaatccatatacaatatggattgaaaattaagtcaccaagaatacatttagcatctttgtgttgggttctatacctaaaaattttccctccctgcccaaggtgattggaaagtactgcaattgagctaaaattttatctaggatggaaaatcaggatagactcgtttaaaaacaagtatattaaatgggttaaattaagcttttacagaacatgcttaattttgatattgagctctaaatgcaaaactcttttatactgaaaaaacacttaaagtagttttgtgtggcatcacagtgatttgtcatgaaaagccatatatgggggacatgctaaaatggcttctgaatgaaatacgacagcagagaaagatgccactgaaatgctgaaattatctttgctgagcagcttttgaatgctaagggttccagtatgtgacccaaagaaagagttgtctcaactccttggtacagggttcattcaaacccccaagctgtgagagtgtgtttatttttaattttttaaaaggtatttaatttccaaccacacttcttatttttttgaaaagacaattttccatttcagtattacattttaccaagaagtcactgctttttaggtgtgttgcatcaatatttaaataaaatcccagaaatgtattttaaagaatttcaggtttgaaaactcaaaccaacaggaagatatcacacctttgtatgtgcttctttgttcttgaagtagtcattatggttcattggaatctactgtagcataagctcctaggttgctccatttcttaggaaaatagcaatgaatgaatgtatagtagctgcatgtgtgaactactgctgtaaagtttgctgacatttctgcaacaacatttctccatctgatttaccagaacctgtaacaagaccagaacatgtattcatccagaaactcctgggctctgctttgttcaaagaggagcaaatccacatagaaattaaatgttataaatttatttttttaaactaatttccaaagaatttagctgaagactcagagtcagcctacctcttgactctccacatccgcatctaagatcctgaaggccaaaggaatgcgcctgtgggatgccaaagccatcagtagctggaagaaagaatacctctttctagaggtttggtgtcctcttgctggcctgtcattatttggaaatacgcgcttttggaatttccttcattttcgctatttccaggttcagaaatcatacctaccacttgttctttctttgcccagtaaaactcagggtttctcttattcagagttaccatgttgcacacccccagtgctcagcctgcccagaagcccttctctgatctcagcaagatcttagtagtaaagctaacggatccattgaaattcatactcagcatctgtgactactagacaaagcccatttactgaaccataagtgtgcacttttaaactaaattgttaactgaaagggaaaaaatagaaatgagggcattttgaagtttttagaaaagagaggaagagctgttggccagatcaaagagatacttataagcccggcacaatttttaacataagtcattcctggctattaagtaaaatatttcatgaaccagaagtcctgtttctctaatattataatttgttgaggtttgtgtgtgtgtgtgtgtgcatgtgcagacacatgtacacatataaattgaatacaaaaatagctctataacaccaaaaaacagagtttacagaaaataaacacaaaagctatatctgcaagacaagtttgattcatctagtttcatatagtttcatatagtttcatttttattaatatttaggtttaacttatagttctgcaattatttaaaaaacaagtacagagcgtttgattaaaaaaagtcaacaaatgtttcaaaacagctttgtacaaatgttataaaacatatttaatgattaagaaatgtactagactctatcatttacttttaaaacatttaattagaaaaacaggtgatatttaagactatttataaacttattggccaaattgccaaaaa

SEQ ID NO: 77 - DNA, 5916 bp, Homo sapiens
gcccctccctccgcccgcccgccggcccgcccgtcagtctggcaggcaggcaggcaatcggtccgagtggctgtcggctcttcagctctcccgctcggcgtcttccttcctcctcccggtcagcgtcggcggctgcaccggcggcggcgcagtccctgcgggaggggcgacaagagctgagcggcggccgccgagcgtcgagctcagcgcggcggaggcggcggcggcccggcagccaacatggcggcggcggcggcggcgggcgcgggcccggagatggtccgcgggcaggtgttcgacgtggggccgcgctacaccaacctctcgtacatcggcgagggcgcctacggcatggtgtgctctgcttatgataatgtcaacaaagttcgagtagctatcaagaaaatcagcccctttgagcaccagacctactgccagagaaccctgagggagataaaaatcttactgcgcttcagacatgagaacatcattggaatcaatgacattattcgagcaccaaccatcgagcaaatgaaagatgtatatatagtacaggacctcatggaaacagatctttacaagctcttgaagacacaacacctcagcaatgaccatatctgctattttctctaccagatcctcagagggttaaaatatatccattcagctaacgttctgcaccgtgacctcaagccttccaacctgctgctcaacaccacctgtgatctcaagatctgtgactttggcctggcccgtgttgcagatccagaccatgatcacacagggttcctgacagaatatgtggccacacgttggtacagggctccagaaattatgttgaattccaagggctacaccaagtccattgatatttggtctgtaggctgcattctggcagaaatgctttctaacaggcccatctttccagggaagcattatcttgaccagctgaaccacattttgggtattcttggatccccatcacaagaagacctgaattgtataataaatttaaaagctaggaactatttgctttctcttccacacaaaaataaggtgccatggaacaggctgttcccaaatgctgactccaaagctctggacttattggacaaaatgttgacattcaacccacacaagaggattgaagtagaacaggctctggcccacccatatctggagcagtattacgacccgagtgacgagcccatcgccgaagcaccattcaagttcgacatggaattggatgacttgcctaaggaaaagctcaaagaactaatttttgaagagactgctagattccagccaggatacagatcttaaatttgtcaggacaagggctcagaggactggacgtgctcagacatcggtgttcttcttcccagttcttgacccctggtcctgtctccagcccgtcttggcttatccactttgactcctttgagccgtttggaggggcggtttctggtagttgtggcttttatgctttcaaagaatttcttcagtccagagaattcctcctggcagccctgtgtgtgtcacccattggtgacctgcggcagtatgtacttcagtgcacctactgcttactgttgctttagtcactaattgctttctggtttgaaagatgcagtggttcctccctctcctgaatccttttctacatgatgccctgctgaccatgcagccgcaccagagagagattcttccccaattggctctagtcactggcatctcactttatgatagggaaggctactacctagggcactttaagtcagtgacagccccttatttgcacttcaccttttgaccataactgtttccccagagcaggagcttgtggaaataccttggctgatgttgcagcctgcagcaagtgcttccgtctccggaatccttggggagcacttgtccacgtcttttctcatatcatggtagtcactaacatatataaggtatgtgctattggcccagcttttagaaaatgcagtcatttttctaaataaaaaggaagtactgcacccagcagtgtcactctgtagttactgtggtcacttgtaccatatagaggtgtaacacttgtcaagaagcgttatgtgcagtacttaatgtttgtaagacttacaaaaaaagatttaaagtggcagcttcactcgacatttggtgagagaagtacaaaggttgcagtgctgagctgtgggcggtttctggggatgtcccagggtggaactccacatgctggtgcatatacgcccttgagctacttcaaatgtgggtgtttcagtaaccacgttccatgcctgaggatttagcagagaggaacactgcgtctttaaatgagaaagtatacaattctttttccttctacagcatgtcagcatctcaagttcatttttcaacctacagtataacaatttgtaataaagcctccaggagctcatgacgtgaagcactgttctgtcctcaagtactcaaatatttctgatactgctgagtcagactgtcagaaaaagctagcactaactcgtgtttggagctctatccatattttactgatctctttaagtatttgttcctgccactgtgtactgtggagttgactcggtgttctgtcccagtgcggtgcctcctcttgacttccccactgctctctgtggtgagaaatttgccttgttcaataattactgtaccctcgcatgactgttacagctttctgtgcagagatgactgtccaagtgccacatgcctacgattgaaatgaaaactctattgttacctctgagttgtgttccacggaaaatgctatccagcagatcatttaggaaaaataattctatttttagcttttcatttctcagctgtccttttttcttgtttgatttttgacagcaatggagaatgggttatataaagactgcctgctaatatgaacagaaatgcatttgtaattcatgaaaataaatgtacatcttctatcttcacattcatgttaagattcagtgttgctttcctctggatcagcgtgtctgaatggacagtcaggttcaggttgtgctgaacacagaaatgctcacaggcctcactttgccgcccaggcactggcccagcacttggatttacataagatgagttagaaaggtacttctgtagggtcctttttacctctgctcggcagagaatcgatgctgtcatgttcctttattcacaatcttaggtctcaaatattctgtcaaaccctaacaaagaagccccgacatctcaggttggattccctggttctctctaaagagggcctgcccttgtgccccagaggtgctgctgggcacagccaagagttgggaagggccgccccacagtacgcagtcctcaccacccagcccagggtgctcacgctcaccactcctgtggctgaggaaggatagctggctcatcctcggaaaacagacccacatctctattcttgccctgaaatacgcgcttttcacttgcgtgctcagagctgccgtctgaaggtccacacagcattgacgggacacagaaatgtgactgttaccggataacactgattagtcagttttcatttataaaaaagcattgacagttttattactcttgtttctttttaaatggaaagttactattataaggttaatttggagtcctcttctaaatagaaaaccatatccttggctactaacatctggagactgtgagctccttcccattccccttcctggtactgtggagtcagattggcatgaaaccactaacttcattctagaatcattgtagccataagttgtgtgctttttattaatcatgccaaacataatgtaactgggcagagaatggtcctaaccaaggtacctatgaaaagcgctagctatcatgtgtagtagatgcatcattttggctcttcttacatttgtaaaaatgtacagattaggtcatcttaattcatattagtgacacggaacagcacctccactatttgtatgttcaaataagctttcagactaatagcttttttggtgtctaaaatgtaagcaaaaaattcctgctgaaacattccagtcctttcatttagtataaaagaaatactgaacaagccagtgggatggaattgaaagaactaatcatgaggactctgtcctgacacaggtcctcaaagctagcagagatacgcagacattgtggcatctgggtagaagaatactgtattgtgtgtgcagtgcacagtgtgtggtgtgtgcacactcattccttctgctcttgggcacaggcagtgggtgtagaggtaaccagtagctttgagaagctacatgtagctcaccagtggttttctctaaggaatcacaaaagtaaactacccaaccacatgccacgtaatatttcagccattcagaggaaactgttttctctttatttgcttatatgttaatatggtttttaaattggtaacttttatatagtatggtaacagtatgttaatacacacatacatacgcacacatgctttgggtccttccataatacttttatatttgtaaatcaatgttttggagcaatcccaagtttaagggaaatatttttgtaaatgtaatggttttgaaaatctgagcaatccttttgcttatacatttttaaagcatttgtgctttaaaattgttatgctggtgtttgaaacatgatactcctgtggtgcagatgagaagctataacagtgaatatgtggtttctcttacgtcatccaccttgacatgatgggtcagaaacaaatggaaatccagagcaagtcctccagggttgcaccaggtttacctaaagcttgttgccttttcttgtgctgtttatgcgtgtagagcactcaagaaagttctgaaactgctttgtatctgctttgtactgttggtgccttcttggtattgtaccccaaaattctgcatagattatttagtataatggtaagttaaaaaatgttaaaggaagattttattaagaatctgaatgtttattcattatattgttacaatttaacattaacatttatttgtggtatttgtgatttggttaatctgtataaaaattgtaagtagaaaggtttatatttcatcttaattcttttgatgttgtaaacgtactttttaaaagatggattatttgaatgtttatggcacctgacttgtaaaaaaaaaaaactacaaaaaaatccttagaatcattaaattgtgtccctgtattaccaaaataacacagcaccgtgcatgtatagtttaattgcagtttcatctgtgaaaacgtgaaattgtctagtccttcgttatgttccccagatgtcttccagatttgctctgcatgtggtaacttgtgttagggctgtgagctgttcctcgagttgaatggggatgtcagtgctcctagggttctccaggtggttcttcagaccttcacctgtgggggggggggtaggcggtgcccacgcccatctcctcatcctcctgaacttctgcaaccccactgctgggcagacatcctgggcaaccccttttttcagagcaagaagtcataaagataggatttcttggacatttggttcttatcaatattgggcattatgtaatgacttatttacaaaacaaagatactggaaaatgttttggatgtggtgttatggaaagagcacaggccttggacccatccagctgggttcagaactaccccctgcttataactgcggctggctgtgggccagtcattctgcgtctctgctttcttcctctgcttcagactgtcagctgtaaagtggaagcaatattacttgccttgtatatggtaaagattataaaaatacatttcaactgttcagcatagtacttcaaagcaagtactcagtaaatagcaagtctttttaaa

SEQ ID NO: 78 - DNA, 418 bp, Homo sapiens
  misc_feature (295)..(295): n is a, c, g or t.
aaaattttctttttaattctcagcaagtcaatgtacttctacagaagggtgcgcccttacagatggagcaatggttgagtgcacacctggacaagggaggggaaagggttcttatccctgatgcacatggcccctgctgctgtgtcattcccctattggctagggttagaccacacaggccaaactaactccaactggctaatttaaagagagtgacagggtgagtggtttggcgggaacaatggttatggcagagcatggaaatcggaatgagtcaggatggagcaggtaatcngaaaaaggttgctttatgaggaagttaagtttacaagtagaaggcaaagaatttgaacatactgacattactggattctttaaagagaaatttagaactcatatctaacacactgatggctat

SEQ ID NO: 79 - DNA, 463 bp, Homo sapiens
  misc_feature (441)..(441): n is a, c, g or t.
ttgtttttatcttttttttaaaggtgcctctcaaagtgctgggattacaggcgtgacaccagtgcccagaccattttagcctttttcttaccagaaccacactcagcttggggcttaagatggataggctaagaggggaactaagcttgtaactgttgcggagacaggcactccaggtgacagttcacaggccctttcaagtgactggagccatgggatcatttctctccaaggatttgtgagtagaagtgatgtgtgtcatctcccaggtgaacaggttcggccttccctacatgctccaagggtacagtgaagagcagagctacaacagagatggggcctggatccctgaatcactgtatggagcagagtgcaaaccaatattataagcaacagcaacaccaacacaggacaatcgactgtttagtaaataattttttntttttgagtcagggtcttgttc

SEQ ID NO: 80 - DNA, 487 bp, Homo sapiens
  misc_feature (84)..(84): n is a, c, g or t.
  misc_feature (460)..(460): n is a, c, g or t.
  misc_feature (487)..(487): n is a, c, g or t.
accagtatgcatatattttatacataatatatctttaaacataaacctaatacatacatatatacatgtgtagctgcacttgtnaactcaacagtttttagtgcaaacagaatcttagtaatggaggtaaataaagaatgaataagaggtaaaaatggatatagaagtaaaacacaagacatgggggtataaataaattaaaactaagttctgaaaagtgacttttagtaatagaaacctaaaaacatttcatagaaggcaagaacaaagtctgacaacagagtttagttttagtggacattgtggtagtaaatatgtaagttacttctctcttcagaatacaacagatctcactgggccttccagggtcattattcctagaaataatcccactaaatgcccatcttagcaacgcacatttccatgtgtgagttatttctctctcagccccatttaaaantgtgaaatttggatttaggaaggggan

SEQ ID NO: 81 - DNA, 8318 bp, Homo sapiens
ggacttctcaggcaccaccagcagcgccaccgagagttattattattttttgaccaagcagcacatttcctggttcagtggcttgagctctgtgagcagctgactagtcaccccgggtctggctcaggatcagctggtgacgctgggctggagtctatgacttcttccttcagattgtcatgaagaaggggagttaagaggaaactgggggtcctccggaaggcgatctgagcactcaggctgatctagaggaagagtagaagtcatactttttttctcttgcttggtgaattccccagcagagtctggatccagcagtgctgttttccctgagggaatgtggagcagctcggcttgagtctgttgccagcttcaggaagggttcagactgaaaagggggtttgaggagaagatgctttggctgcctgaggtcctgcttgcgttcttagaagtcagatccagggagaaagtgaactgggacaattgacaagctccaagggtctggcagaagcttcctccgagactgggcatttcatcctccctggaggaagatctgcctgcactgcaagtgtccccaggaggagcacatggtgacagtgatgccgctggagatggagaagaccatcagcaaactcatgtttgactttcagaggaactcgacctcagatgatgactcaggctgtgctttggaagagtatgcctgggtcccgccgggtctgaagcctgaacaggtacaccagtactatagctgtctcccagaagagaaagtcccttatgtcaacagtcctggagagaaactgcgaatcaagcagctactacaccagctgccgccacatgacaatgaggttcgatattgcaactccctggatgaggaagagaagagggagctgaagcttttcagcagccagaggaaacgcgaaaacttgggccgcgggaatgtcaggcctttcccagtcaccatgacaggagctatttgtgaacagtgcggaggccagatcaatggtggagacatcgctgtgtttgcgtcacgcgctggccacggcgtttgctggcacccgccgtgcttcgtatgcactgtctgcaatgagctcctggtggatctgatctacttttaccaagatgggaagatatactgtggcaggcaccatgctgagtgcctgaagccgcgctgtgctgcctgcgatgagatcatctttgcagatgaatgcacagaagctgaggggcgacactggcacatgaaacacttttgctgcttcgagtgtgagacagtgctgggcggccagcgctacatcatgaaggagggaagaccctactgttgccactgcttcgagtccttgtatgcagaatattgtgacacctgtgcccaacatataggtatcgaccaaggtcaaatgacctatgacggccaacactggcatgccactgagacctgtttctgctgtgctcactgcaagaaatccctcctggggcggccattcctcccgaagcagggccagatattctgctcacgggcctgcagtgctggggaagaccccaatggttctgactcctctgattccgccttccagaacgccagggccaaggagtcccggcgcagtgccaaaattggcaagaacaagggcaagacggaggagcccatgctgaaccagcacagccagctgcaagtgagttctaaccggctgtcagccgacgtagaccccctgtcactgcagatggacatgctcagcctgtccagccagacacccagcctcaaccgggaccccatctggaggagccgggaagagccctaccattatgggaacaagatggagcagaaccagacccagagccctctgcagctcctcagccagtgcaacatcagaacttcctacagtccaggagggcaaggggctggggcccagcccgaaatgtggggcaagcacttcagcaaccccaaaaggagctcgtcactggccatgacaggacatgctggcagcttcatcaaggaatgccgagaagactattacccggggaggctgagatctcaggagagctacagtgatatgtctagtcagagtttcagtgagacccgaggcagcatccaagtccccaaatatgaggaggaagaggaagaggaagggggcttgtccactcagcagtgtcggacccgtcatcccatcagttccctgaaatacacagaggacatgacgcccacagagcagacccctcggggctccatggaatccctggccctgtctaatgcaacaggcctctctgctgatggtggtgccaagcgccaggagcacctatcccgattttccatgcctgacctcagcaaagactctggaatgaatgtgtctgagaagctgagcaacatgggcactcttaactcgtccatgcagttccggagcgcagagtcagttcgcagcctgctctctgcccagcagtaccaggagatggagggaaacctccaccagctcagcaaccccattggctacagagacctgcagtcccacggaaggatgcatcagagctttgattttgatggagggatggcgggcagcaagctgccagggcaggagggcgtgaggatccagcccatgagtgaacgcacccggagaagagctacttcacgcgacgacaaccgccgtttccgacctcacaggtccaggcgttcccgacgctctcgctccgacaacgccctccacctggccagcgaacgcgaggccatctcccggttaaaagataggccccctctgagagccagggaggactatgaccaatttatgcgccagcggagcttccaggagagcatggggcatgggtcccggagggacctgtacggccagtgccctaggactgtgtcggacctggctttgcagaatgcctttggggaccgctggggaccctacttcgccgagtatgattggtgttccacctgctcctcctcttcagagtctgacaacgagggctatttcctaggagaacccatcccccagccagcgcgcctgcgatacgtcacaagcgatgagctgctgcacaaatacagctcctacggcctccccaaatcttccacattaggtggcagaggacagttgcacagcaggaaaagacagaagagcaaaaactgtatcatttcttaatatgattgggatcagggaatgggagaagatgggagctaagaatgtaaagtcagaaacttgcactgttttaaatgttaaagcgcttttgggggtggcttatgggggagaaaagggaaaatgctgtcagtagatggaggcaaggttacaggttgactcaataggtagtcacagttcttggcatgttgaatattatttgcacatttcactttggaaacacagtagactctatcgaggccaggcttggtcacttccttcccatcagttctgtgttgagttgccatctctcaagatggtaaattgtttcctgctcgcttttatcctctctggttctcttacttttaggacccttttttcagtaagtaatttgtttattagccaggacccaagactaagttatttacatgtccattgtaaatgcaatgtaaatgagagttctgataaaatatttttgtattttgtaatatcaaaggaatttctatatcgtaggactcagtggggacttgcatgcacatccaccattgtctctgagtagtattgaaatgtggcccggtaccacctttttttttttttttttttttctatacaaatttgttacatgtcagtgagacctttttcaaaggaacatattcaatttggctttttgtggctgaaaaaacataactgttagacccaaagcattttatgctccgttccatcttaaggagccatccttaagtctgctcccaccctcagtagaatttattttctacaaagtggtagtaatttttttttaaattgcaaatgtaatttttgccaattagagaaaccaaccggtgtcagtaaaattctgtgagaaatgccatccctgctgggaatgttgaagttacttaatgttgatctatcccttggggaaagtaaaagtgactgtgagtggtgccattgtgtgatgtcagcatgacgttgttttgaatgtggcattatgttctggtgctcatgtttcctggattgtattatctgctttcctttaccaaggcagacagaactgctgccttagcctgacaaccggttgtcctcaaagcaaatgaacttaagcatttgggattgagggacagaaggattctgagggggctctgcgagggacggtgtgtgacatgtcatgcctggagaaggaacaaggctatttgaaaacagaaggcaggtcaagggtagaagttaaaggagaatctgaaggcaggtcagggaaaagaagaactggaaatgaaacagaggacaggtgacaaccacctcgaagagctcgcagagattgtagaaagagtccagtgtaaccagcttagtaaccagagtatctggattacccaggaaggttgagctgctgagatttcagtggtgcaatgtctttaaaaaaacaggctttgttgggagggtatttccattttgaactttgaggactgttggtcagaaaatgggctcaaaagtgagtttgcttaatgaagacatttaacggttgtgctgtttatagtaaaataaaactccctaccttgcttcagttaaaaatgaagcacttggtttcttccatcctcctcctccccttaatggattgtggcagttgaaataatccatcggaggacccacctgtagtgagatgtactgtcgatgtagtgcccggtgtatctcagtggccatctgccatggtgaggtgagcgtgatctcttttcagtatagtagttaacattttctagtattttttatggagagaatgtcaaaagtggcatttcagaccccgtcccagatgggtctgaggaaaggaaggctgtaaaggacatggtaatggcactccattcgggatgtattaaaataatttgcttttcaggtattaatatgacatttgtcattgtcactgatttttttaaaaaagcaatgcacatgttggttgtggctgttttccgcatgctatcttcatatctaaatgcttcattaattatccgagcctccggagaattaactctattacgtttgtatagtaagtttgtaaactgcttggcaaactgattaagaaataatttgcaataccgtgttactaaagtggcaggtttctggtagaaattgtgcgagtccaatttggagttttaagttccttgattgatgaaactaaaaaggcaattttggaaaaagagagggggaaaagtagatcacttatcttagcaaacggttgaaaatatgtctgtcctctgtggccccaaatccagtgaaagaaattctcccagtaaaagttgcttcctaactctgtttttctcagaatacctcttacctttctcaaagaaagcttcaaccaccatcatcagaaagaaggtggcctaaaaactgacacatggccagtgcccggaggggtctggaggcataagtctagatgcccagagagcatccaggcactgaactgctcagagcttgagatgaaatgacatacaagcttcagggtaaaactgtctactagcaagattacctccctcaattctaccattgcagatttcttctgaccccaaatgcaaccttacagagaatgctgaatgaggaaggccaattccttacaatgatggcagaacccccaagcgaatgccctattgaggagaaggacatcactgtatttggaattctgcctgctagtgatagctcacacatcacatcccagaatcccactcccaatgcattatttcctgaggcaagaacttaaggtcctcacctaattcctccatcacaaccattaactcttattggacaagctcctcctgtgagtggggcctgtactcacttcctcttagttcataattccatcttcaagagactgatttccagaatagtaatctttttccagcgttctctcttctccaatgccctggttgttatttttcccacctctcctaatattgatcttcttgtcttttggttagaactgcaacttcggagttgagttcatttcctattgctgctcaattcagtagcaacatagctggcttgttcccagacccaggaagtataagtcattgacagtttcctgagtggctctgccaatccataccacccttggtactgtgaaaaggcttcttggcagccaggtggcattgaggatggtattcagggcgctttccttctgtcatatagttgtgggatctctaccaagtgtgaaggtgaatgaggtaagggagatcagaaccatgcttcctggtttttcatacatccaaggaagaagtcctggtgtgggttgtttgacaccttctttccactttcaccttttattttttattccttcctttctacccccaaccagtcgagcaaatgagcaattttgtgtttctaatacaggatctggaagtagtgctttctaatcctcatttcctgtaggatgttcctgcactataacaagattatgttttcttccttctgcagcagctttctgcttcttgggtactactagctattgttcaattcaggtgaggcctgtgatgacatatatgtagcatgtgctctgcgctccctgcaagctgagcagatacaaccaatgcatcactgtatactcttgctgagaatgtggatgcagcctcacagatctttgcaacactccaaccagccaggaccagttgatcagaactgatcttattggtctgataaccaatcttatttgtgaactgattcatatctgtctttccactcttggttttcttgccgtagaacaaaaacagtttaggaagcataattacgaacatttaggaaccaatatgtataagtaattcggagactccaattcacctgcccctcccccatcccaggttgtggaggctcgaggaagctgacttcttaggctaaaggacaaaaaaatctctttacctccttggccattttcatgttctctgccaattactataggcagtcttcattttgcagaggtgaggtaagacttcatcttattcttcatgtaatcccaccttctaacaaaaaataaataaatatttaaattccaaggagaagtgttctttgtgtatttctagcagaaaacagatgcttaagcctaagaaggaagatccgtccatgacaaaggaaagtggaaaactgaaccagttatctgaatacttcatgccaggacagttgctattagcaactgttttgcaccttcagggctttaaaatgggctctgcagacagcatttgcatatgcaagactcagtagccaagcctccactgccaattgttgaaggcagtttcagatcgccaccttttgaggtacatttctttaagcacaagagaagtagaaatggcctttgccttgtctccagtggtttgtccctctggtgcctcagcagataccagagcttattcttatgaccatttggaagtagtcctcaaagtaaagatcaagaaaaaattggattctttttccattttctcataatagtagcctagtcaacacaagactcccataaaatatgactcactattgggagccatactattttataagcttacttcctgctgacaaaactagctttcctcaaggaaatataaaggaggggaaagtcacatagtgttaggaaaacattcctgtgttttgaatacgatgaatccgtaggatagagaaaaatctgcttgttctattctgagagttctctgagatatcccttcactctgcttggcatttggccattgatattcaacaggtcactgaccaagcttttctaaatttttcagagagagttacttaccaataaggtctgttcttaaacctacctagttgattttcatatctttccataaagtgtcatgattctatcatagaccctgacttaacattgtaaggactatgagtcctccattttttaattaattattttttagcaaattaggacttcggcaggttttcctctcctaaactcattctttcctccacaggattgctttgtccatctcctctttcatttcaagtgcataaacaaaacctcaaagggcctgggaaggtgaggcaggccagagtctgtgttctgtgttgagtgtcaagctatttgttaagaaggtctgcaacaggcctttggtgtgggctctgccagagactgttctgaacactttgcttgagatccgtgccctgtaaaatggatatgatgttttactgatgtctgtaatacatttgtaaacttccaataaaatttgaataaaaaaaaaaaaaaaaaaaaaa

SEQ ID NO: 82 - DNA, 435 bp, Homo sapiens
tttttgcaatgtaaatttaccttttattaggttattataattttaatgaggaagggtattctttagattatacttttgctaattaattctatcttttgaaagatttgaatcatttttattacaaaaaatagtttgaaaaatctagcaatgtgcttgtgtcataatgacgtctaggcgaccagtagctgagaggtatttacacatggatgaggaaacaatgaaagttacttttcctaacattatatattaattcaatcaaaatatttcaatcacccattggccaaggtctggatatgggggtgataaagcagagaaagtagcagctgagagttgtcagccaacactcacagcagctgtggaatgggcttattgcttggaaaggagatccaggcagattgagaggtggggtctcagttttcctgattatcagatatc

SEQ ID NO: 83 - DNA, 367 bp, Homo sapiens
tttggccatgtagtcttttatttgtgtgtgggtgtgtgtcatcccattaacatccctcagaggaactccgatccacacttcgggaagggctgatacagaagaatgggccaaagtgcgattttcagttctcagggagcatcttgcagacgtcaggggtcttccgtgttgccctctccccacccagcatgccacattagcctctggttggacccctgcagttctttggccaaacacctcaagccgttctctgcagctcgactccaagctctgcccttgcctggccccaagtggtggaaggatgtggggaggaaacttacaggggcagggacgtttgaaggacatgtaatccttggagcagaacagcgga

SEQ ID NO: 84 - DNA, 460 bp, Homo sapiens
tttttgatggtgaatagaatagctttattatgagaaaaagggggaaggcctggcaaattactcagaaattatacattcatctatgctaatttcatttgaaagggaaactgcataagtttttttgtgcaatcaggcagagctgcactaggtatgatggagatcagccctatgctcacagtccttggctcatcagaattctttgaagacatcattactgtgaagctgctaagctgttttcagaagagaagaggaagcacagagtaggtgctgttattgctttgaatggaactcagcttgcttgtgtgggtttggagttgatatcatctactaagagaagacttaattgtagtcataaacagtctgtgaatgacttgggtccttctgaagtgctgtatatgggaaatttctttttaactctccaacatttggtaagaaaaatcttccaacaaatggaattgcc

SEQ ID NO: 85 - DNA, 489 bp, Homo sapiens
  misc_feature (1)..(1): n is a, c, g or t.
ntgtctgcagtgccggagtctgggaggctccgggcgactccctgctgcaggttatgatgatgtcagacaatgctaaaggcagagcagctcattcatggaagaaaagagggagtatttcttctctaagtaatcatgaattttggcgaaaggaaattcatgggcgcatcaaagaccctggaagtctgtggattacacatacaatgccttttacaggtgggaaactgactataaaggagtagcaatcccagcacatgtcagaagtaaagctaatttgagttttgtaccacctcttcttctccatgaatttttaatatggtgttcagtagaaaagaaattgagtttttatgaataccttctgtattatgcaattctatgagtactgtgtcttatatggaagaacccagtcagcgtgatgatatctctcgccttacagttcagatggaaaacacctatcagttgggtgtgttcttttatctctcactcctattt

SEQ ID NO: 86 - DNA, 515 bp, Homo sapiens
ttttataattctgtgactgtcaccattttattctgatgttcaaatcgccccatatttggcctgttggaatcttttcaagttggcttctctgctttttttgggcatgtctccatcattctttgagcattgccttactttcttgtacaaaaagatattctgggctcatcttatactttctgtgctctagctttgaaattaccgtttcttcaaagagctctgtttccttttagaggaggatggtttttagaaaccaagttctaggtagcaggtgtgcttgttgctgttgaggtgttgcagctcccaggccctttccgtgaacagagctctaaggaagcataatgaaagttacaacacgtgctttgtgtgtattaatattattccagcttatcatcaattaaaaataccaatatctagacctgtacaggctttttaattctctgagaaggacctggatactctggagaatacaaatctgtgaggaataatgagttgattagtgtcagctttcccaatcc

SEQ ID NO: 87 - DNA, 455 bp, Homo sapiens
aggagtggtggtggtggtgtggtggtgattaggtacagtgctttcaatgcagtcttgcagacagaaaaaaaatctttctcaaagcttacaaacatttcccccctactatttccacccttcctcaggccacatgaatttgtgtcacccagataataaagaagcagcatgtatgctcttaattaccagtcaaatataaatcaatactaccctaaattaatggctttctgcaagtctacattaagctgaggtctacatgttggcaaatcagggttttgacttttttttttaaggaaagtttccaaccagttcctttccccctctttattaccagttaatttccaggggtttgtttttgcctttttgttgttgttgttgtttttgttgttgagatggagtctctccctgttgcccagtggagtgcagtggcaaatctcagctcattgcaacctctgcct

SEQ ID NO: 88 - DNA, 416 bp, Homo sapiens
ttttcactttgcagttagctctccttcccttgtaaacagttttattcatttttaagaatcatgcagcaatccataaatattgcattcttgatgtccccactgtagtgtgaccacaagtgtactccagggagaggggtacacagatggcacaagcagtatacacatgcacacaccaggtgtgcagaccaaagcaaagtgagcgaccagcgtgctaaactccaggtgggcaggaccccaactcccaggtgaggtgggcaggaccctaactcccaggccagccggcttagagtgtggtggtctgtgcccaggagatgcctcagcgggggtagaaactctggtgggatggagctgggcagaaggaaaaaagggctctgtgaggaagccgggatcacaccacctgaaggcaatagggagag

SEQ ID NO: 89 - DNA, 1485 bp, Homo sapiens
tcagccaattagagctccagttgtcactcctacccacactgggcctgggggtgaagggaagtgtttattaggggtacatgtgaagccgtccagaagtgtcagagtctttgtagctttgaaagtcacctaggttatttgggcatgctctcctgagtcctctgctagttaagctctctgaaaagaaggtggcagacccggtttgctgatcgccccagggatcaggaggctgatcccaaagttgtcagatggagagtaaatacaaggagatactcttgctaacaggcctggataacatcactgatgaggaactggataggtttaagttctttctttcagacgagtttaatattgccacaggcaaactacatactgcaaacagaatacaagtagctaccttgatgattcaaaatgctggggcggtgtctgcagtgatgaagaccattcgtatttttcagaagttgaattatatgcttttggcaaaacgtcttcaggaggagaaggagaaagttgataagcaatacaaatcggtaacaaaaccaaagccactaagtcaagctgaaatgagtcctgctgcatctgcagccatcagaaatgatgtcgcaaagcaacgtgctgcaccaaaagtctctcctcatgttaagcctgaacagaaacagatggtggcccagcaggaatctatcagagaagggtttcagaagcgctgtttgccagttatggtactgaaagcaaagaagcccttcacgtttgagacccaagaaggcaagcaggagatgtttcatgctacagtggctacagaaaaggaattcttctttgtaaaagtttttaatacactgctgaaagataaattcattccaaagagaataattataatagcaagatattatcggcacagtggtttcttagaggtaaatagcgcctcacgtgtgttagatgctgaatctgaccaaaaggttaatgtcccgctgaacattatcagaaaagctggtgaaaccccgaagatcaacacgcttcaaactcagccccttggaacaattgtgaatggtttgtttgtagtccagaaggtaacagaaaagaagaaaaacatattatttgacctaagtgacaacactgggaaaatggaagtactgggggttagaaacgaggacacaatgaaatgtaaggaaggagataaggttcgacttacattcttcacactgtcaaaaaatggagaaaaactacagctgacatctggagttcatagcaccataaaggttattaaggccaaaaaaaaaacatagagaagtaaaaaggaccaattcaagccaactggtctaagcagcatttaattgaagaatatgtgatacagcctcttcaatcagattgtaagttacctgaaagctgcagttcacaggctcctctctccaccaaattaggatagaataattgctggataaacaaattcagaatatcaacagatgatcacaataaacatctgtttctcattcc

SEQ ID NO: 90 - DNA, 294 bp, Homo sapiens
gcataggatggaagctgagcttgaagtttaattggagcgacgaaccatagaaatgtagagttgtgagccagacagggtggagacaaagaccaggagaggcctgcccatcaaccatttgtggattctgcactcttggacactgtgttaatgcaattctattacactgtctctctatctaggcccctaccaccagggacctctatgtgaggcataaaccagtagggagggcccacactccattttctcttatgtggtctttattgttcagcagatagatttttctgcttgaagggg

SEQ ID NO: 91 - DNA, 194 bp, Homo sapiens
actaaaaataacaggttttattcagaatgacacggtccttgctcaagaacaacaggagtaaccagagaatgaggggagataagttagcaatcagtattgataaagaaacatttgagaaacaccccaaaactgaagtactgatcagcagcctggcccaggttccttagaagtgagacctgtatatgttcccgtta

SEQ ID NO: 92 - DNA, 280 bp, Homo sapiens
gaccagtttcaccatcttttttattggatacagagccataaattctctgatgcccatgtgagtccttttaaatacatacactcaggtacattcagcaaagggcatcttacgggtgacatggagcaaagtgctgggatggcgatgcctgggtggggcagagaagtgtggccagggaaggccccctgggcgctggaggtacaggcaccacttcagaaacaaaaataaaaccaaaaattgctctccacccctctgcctgtgcttggggctggggaagctaccc

SEQ ID NO: 93 - DNA, 364 bp, Homo sapiens
ctaagacagagtcttgctctgttgcctacgctggagtgcactggtgagatctcggctcactgcaacctccgcctcctgggttcaagcatttctcctgcctcagtctccctagtagctgggactacaggcgtgcaccaccacgcccagctaatttttgtatttttagtagagatggggttttgccatgctggccaggctggtctcgaactcctgacctcaggtgatccacctgcctcggcctcccaaagtgcgggtattaccggcatgagttaccacgccttgccatattttgatgttctgatccccaacttctccagcatgaccagctaatatgttttcatatgtcctctccaaagctcaagtt

SEQ ID NO: 94 - DNA, 596 bp, Homo sapiens
gctgagatgacaatagtgtatttatgctgtaccttttctatgtttagatgtgtgtagatgcacaaatacttgccgtggtgttaagattgcctgcagtattcacaccataacatgcactgcaggcttgtagcctaggagcagtcgactctagcgtccatcctgggtgtgtattgggctgtaccatctgggttggtgtaagtgcacgctacaatgttcctatggtcataaaatcacctaacgacacatttctaacgacacgtccctgtcgttaagcaatgcatgactgtactaacctctcctgcagttgctcagatggggcgagcctcctgtttgtgctagggccctggctgctaggctggaagcctcatacgtctcagtgcatcttcccctcccaggtcatggtgatgcccaatacgtttggctggagcaccctgaagtctctgctaccatccaagctggtttggagacgtgaaccagaccaatgaagggcaggctttagatggtcattttctcattaggctcctctctccccacgctagatccctggtgtctgctgcccctcaatggagaaatccagcactggagaaagaagggtc

SEQ ID NO: 95 - DNA, 386 bp, Homo sapiens
tttttttttaaaagaaaccgagtttattagagcaacggtatatagtaaaacagctgcttgctccatagacagagcagggctatcctataggcagggtggcccagagtagcccagttatttacaatggctttaaatgacaaggcccggctatgtgccagaaacctcacatcctcccactacctggtgcacaggggctcatcccattttccaacaaggaaactgtgcctccagctaggcagcctgtgctttctgccagaccacactgcctccccatgctggtcaccatgcacgcagagctgacacagcattgcctctggcccccagggagagcaccactctttaggccagctcgccctgcctgcagacagaaaatgcccagccagagc

SEQ ID NO: 96 - DNA, 335 bp, Homo sapiens
tttgaaacattgaaatttatttttttccatatgaaaatccattattttctgtgcatcctgaggcacaaataaaaaggtgtatcttttataattttgttgaaatttgaaaatactatctttggggttttctaatttcttgcgcaattgtttttccaaaagttaagtgggaaaaagggatttaaggagggagggagagagaaaaggagggagggagagaaggagagatggattttgcttttcttctttgatcagcagaaaaaaatgtgactgctagcaacagcttttaggagaggggaacaggaatctagatgtgcagaagccaggagggcatatgt

SEQ ID NO: 97 - DNA, 582 bp, Homo sapiens
  misc_feature (449)..(449): n is a, c, g or t.
tttaatggggctagggtttcgctatgttgctcaggctagtctcaaactcctgggttcaagtgatttttctacctctgcctcctgaagtgctgggattacaagtgtgagccactgtgcctggcctaaagtgatttcaggtgtcaaggcaggccccaccgcagtgacatctgcacatacctggacacaggctgtgatcaacatatcctgattcgaatgcgaagatttctaactctagacacttgcagtaacatttgggaagttgatattcctacaaattctctatctcattaaacaaaattacccgcgtttggtttcacaggctctattggcatggactagttcaagtatcagtgcctccatcaatgtttttacaagtcactaaatactgaaagtccttgacaaacttaaccagcagttttggaatacgagttgtgggtaacgcggcactnggactcaaccactgaccccaaaacagatcttaatgtctgcggttatggaactctgttcagacttcaaaggaaacgactcctctctgcagacattctcactccttttcaggggtccctgggcccagggtaagac

SEQ ID NO: 98 - DNA, 481 bp, Homo sapiens
agatacattttaacagctttaagaatctccttcccaggctgtctggcttcttagaaggcatgtgataatctgtttcagtgagaggaaagagaaaaaccacagataagcgcataccacaattggtctcatccagtcctttagcagaagtggagaataggagtttttgaagaagcgaaacaaacagctctctgaggcctggacgcttgttccatcttcagcacctctgacacagcaaaagatgtctagccgatttttctgaggggacagagggaaacaaaggttatacccgctagctgcttcctctagattctagactcaaattaaatagactataatcctggcaccaacttacctcttgacgtttaatgtctaaccccaagagactcacgaaacaggtaatctgcagaagaaagtcaatgaagactgccaatcccgcaaagagagagaaggtgtgcacggctggcatcacggacaatgctcc

SEQ ID NO: 99 - DNA, 479 bp, Homo sapiens
  misc_feature (160)..(161): n is a, c, g or t.
  misc_feature (432)..(432): n is a, c, g or t.
ggggccgccccgggttgtgagggcgtgcgcgttgggcagccgtgggacctcgggaccgtccgcccccgctctgtgtctgcacctccactgggctgagcctacccgggccctgcagtccagctctggccagggtcgtctgggtccgtgggggcgtcggctnnggtctctgacttgatcctgtgtccagagcagccttggggaacaggcagctggagccgcgtttaaggcctggggtagggtgcctggaaacgtgaagtggtttgaatgacccaggggcttggaggggtggcggccgagaagagcggcggggaaggtcaggtagggggtaggggttgtgtgcacaccgagtctgcatgttttccatcattcgtggcgtgcaggcgtgtacacctgcgtgaactacatgttcacagacgtgtgcacaagtgtgantcggctttgcttggtggacatttggcaaacgacaatggaggcaaaga

SEQ ID NO: 100 - DNA, 378 bp, Homo sapiens
agacacggggtctcactatgttgcccaggctggtctcaaactcctgggttcaagtgatcctcccacctcagcatcccaaagtgctgggattacaggcatgagccaccgcatccagccacacatctctttttgaacatggtcattctgaaacctattcagaagtggttaggttatgaccatgcccattttccaacctagggaactgctggcagcttgacagggaagtcacggtgactccagaggttactgcatctttcatttacgttacatcctgtagtgcttggctttttaaagcaaaagttgtgagctcctctgcatgtgcctccttccccaaaaggctgccacactaccgtataagaaaccgtataagttgctact

SEQ ID NO: 101 - DNA, 420 bp, Homo sapiens
ttttcataggcaaacattattattttatttattcccaaatggtgcaagtattttagagtatgccacatagttttctatatgccagcagtctttttcaaaaatacgtatacattccacttcagtccccctcatactgtaaatttgtagacaacatgcttgttacattgctctcttcctgcaatacagtccttatttcccctccatccatcttgaaagtattcctttaatttctccagtaacactatgggtttgccatttcgggcatcaatgacattcagggatgtggccatagacttctcgcagcaggagtgggaatgtctcgaccatgttcagaagaccttgtattgggatgtgatgatggagaactgtagtaacttggtatgttttctgcctcagacaatttaggataactttgaatct

SEQ ID NO: 102 - DNA, 184 bp, Homo sapiens
tttgcaaattgatccacactcaatttattgtttctttcagctgtgaccacggaaggaaagacagaattttcatttcttagcgagactctcgatgttatccgttgccttctgaaggaatcactagttactactgctttgtgtttgggtactgtcctgtgatttggatctgctagtatatgcttca

SEQ ID NO: 103 - DNA, 564 bp, Homo sapiens
tgaggtttctcactgtgtatgctgtttcttagcctaggagagccttttcgttcttctcctaagactaacattttactaatttgtcaaggagctagagctcctaaacacgccatcttgaattcttccctgcgaccccagtcgggctgaaagctccttccttgtcgctccccactgaacagatttttcttggggcggggagagggggacggagtatcgctgagtcgccaggctggagtgcaatggcgcgatctcggctcaccgcaacctccgcctcccgggttcaagcgattcttctgcctcatcctcccaagtagctgggacttccggcgcgcgccaccacgcccagctaatttttgtatttttagtagagccggggtttcaccttgttggccaggatggtcttgatctcctgacttcgtgatctgctcgcctcagcctcccaaagtgctgggaatacaggcgtgacgactgcgcccggtcagaacagttttaacctccagcaatgaccactgcttccttctgcctgcagttggaagtcagtttcagttttcttattccctataa

SEQ ID NO: 104 - DNA, 286 bp, Homo sapiens
tttggttagaaactatatttagaatttcaatagaagaggccagaaacacagctgcccacatctgaaagaacctcagcagtaacagtgggggattaccaagcaaccaaggaaaatagaaactctccccactctgagctgctgatggtgactcctgtgactgagggcaaaatgacggctgaaagtgagggctaggaaatttaaggaaaagaaaggtgtggcaaagatgtgacagaagggttttctagttaggtgaggtggaaccaagttgagtggaatgagcacatgc

SEQ ID NO: 105 - DNA, 386 bp, Homo sapiens
acatattatatgattccatttataggaaatattcagagtcagaaagcccattgagacagaaagattagtggttgccaggggaagggaatgggggaaaatgggcagtgactggttactggaatgggatttcctttggtggtgatgaaaatgttctagaactagttagtcgtgatggctgtacaacattctgaatgtactcaatgtcactaatagctttcatattacatgtattttctccacaatttaaaatacaaatatacatttttttaaaattccctcaaaccagtgggcaggattgaatggagctatctttccttgtttagggacaagatccctgtctcctccatgagaaagcataagaaaataaattcaaattttctaatgta

SEQ ID NO: 106 - DNA, 369 bp, Homo sapiens
ttttttattttttttttttttttttttcttcatcacatacattgagcaccaagagggagccaagggtggctgtgcacaggatgtgagcaggggcggtggtctggctccagcaaggcttgggggcatttcacaggtagaaggcagcagtgttgtacctgggcagaaagtcattaagattttgtaggagagggtgatctgctagagaggaatgttgtgttatgggtatatatgcttgaaattaaaaccatatcccagttaaaatacacagctggtgagtcattccacaaacctttagaactctgatgctttaaagccagacttagccatttaataaccacttaggcagttaatagtaaagtaattgtagta

SEQ ID NO: 107 - DNA, 3653 bp, Homo sapiens
gcgctcggcgcccaccaggcggacgcccaggagaacccctgcctccgtcgcggctcctggagagctgatcgttcacctgccccggcccgcctgaggacgggggtgccttcatgcggcccccacactcctcaccccgccgccgccgccgtccccgagctccgcacagtgcgccccagccccagcagggcgcacaactttggaagtctcgcggcgctccgagaggcggcagagtccgcgccccagccccgggccgggccgggccagaaccgcagcgtctgggggaagccagagagtcggtaatcgcttcggggatgtaaggcgacagacataggacccccgagctcgcatcagcacccttcggctgcctcccggggtgggggcgggccccgcacacggtaagacctcttgctttcgctcaggctcaagattcaagatacagatattgatatgtatatatatatttaatttcctgtcatccttccaagttatcaggccaccgatgatttttgttctcccttcttgaagaataaatctctctttacccatcggctctccctactctctcccgccgcttagaaataaaacttggctgtattaggagctcggagcaagaaggcgcccaccgagagcgtctgaagcgcgagccaggcgcagttcgcgggacccgggccatgggccgctagcggtcctccagttcgggcccggcctccctgcggccccctccctatgtgagccgcagccaggcgagcggggcgccggaggaagaggaggacccacgggcgccgggccggaaggcagctggcagcaggcccaggccagcgggcgcccgcgttcatgttccgccaggagcagccgttggccgagggcagctttgcgcccatgggctccctgcagccggacgcgggcaacgcgagctggaacgggaccgaggcgccggggggcggcgcccgggccaccccttactccctgcaggtgacgctgacgctggtgtgcctggccggcctgctcatgctgctcaccgtgttcggcaacgtgctcgtcatcatcgccgtgttcacgagccgcgcgctcaaggcgccccaaaacctcttcctggtgtctctggcctcggccgacatcctggtggccacgctcgtcatccctttctcgctggccaacgaggtcatgggctactggtacttcggcaaggcttggtgcgagatctacctggcgctcgacgtgctcttctgcacgtcgtccatcgtgcacctgtgcgccatcagcctggaccgctactggtccatcacacaggccatcgagtacaacctgaagcgcacgccgcgccgcatcaaggccatcatcatcaccgtgtgggtcatctcggccgtcatctccttcccgccgctcatctccatcgagaagaagggcggcggcggcggcccgcagccggccgagccgcgctgcgagatcaacgaccagaagtggtacgtcatctcgtcgtgcatcggctccttcttcgctccctgcctcatcatgatcctggtctacgtgcgcatctaccagatcgccaagcgtcgcacccgcgtgccacccagccgccggggtccggacgccgtcgccgcgccgccggggggcaccgagcgcaggcccaacggtctgggccccgagcgcagcgcgggcccggggggcgcagaggccgaaccgctgcccacccagctcaacggcgcccctggcgagcccgcgccggccgggccgcgcgacaccgacgcgctggacctggaggagagctcgtcttccgaccacgccgagcggcctccagggccccgcagacccgagcgcggtccccggggcaaaggcaaggcccgagcgagccaggtgaagccgggcgacagcctgccgcggcgcgggccgggggcgacggggatcgggacgccggctgcagggccgggggaggagcgcgtcggggctgccaaggcgtcgcgctggcgcgggcggcagaaccgcgagaagcgcttcacgttcgtgctggccgtggtcatcggagtgttcgtggtgtgctggttccccttcttcttcacctacacgctcacggccgtcgggtgctccgtgccacgcacgctcttcaaattcttcttctggttcggctactgcaacagctcgttgaacccggtcatctacaccatcttcaaccacgatttccgccgcgccttcaagaagatcctctgtcggggggacaggaagcggatcgtgtgaggtttccgctggcgcccgcgtagactcacgctgactgcaggcagcggggggcatcgaggggtgcttagccccagggcactcagaaacccgggcgctgcctgctctgcgtttcctcgtctggggtggctctgcagcctcctgcgggcgggcgtctgctgctcctacaagggaagcttcttgctgccaggcccacacatccccagttgttggtttggccactcttgacctggagccatcttcctagtgggccacccctaatcactattgcttcctaaaggtattttcaccctcttcgcctggtacagccctcacagctcttcagagcaagcactggactacaagggcatggctcacaaaaggttaatggatgggggttacctagccctggctaattccccttccattcccaactctctctctctttttgaagaaaaatgctaagggcagccctgcctgccctccccatcccccgctgtaaatatacactatttttgatagcacacatggggcccccatatctcttggccttggttttgatgttgaaatcctggccttgggagagatgccttccaggcagacacagctgtctggttcaggccaagcccctttgcaatgcaagccctttctggtgttatgaagtccctctatgtcgtcgttttcaccagcaactggtgactgtcccttcgacacggacctgctttgagatttcctgacagggaaaagatttctgtccatttttttcctgtgcctaacagcataattgccttttcctatgtaaatattatgatggtggatcaagacataagtaaatgagcctttctgcctcacatcagccctgtgtataaagccattattctctgatgcactgtttgccccagtaactcactttaaaacctctctttccagtgttccctctctccctccagggccactgcttgaagaagaatatgtatgtttctatcttgtatgtctgtgtgcccctcctgccccgaaagtgctgactatggggaaatcttttagctgctgtttttagactccaaggagtggaaattatgtggaagaagcaaacctgatacaatttgcccaaggtaaacagtttgaaaagacaaatgggcctgccaaactgtacagtttcttccccaagagctgttaggtatcaaaatgttgtcctttcccccctccgtgcttttctggttgagatcatgtcattgatgaactgccaaagtcaggggaggagggcagagactttgtgtttacatctgcatttctacatgttttagacagagacaatttaaggcctgcactcttatttcactaaagaaaaactaatgtcagcacatgttgctaatgacagtggatttttttttaaataaaaaagtttacagatcaaatgtgaaataaatatgaatggagtggtcaaa

SEQ ID NO: 108 - DNA, 8615 bp, Homo sapiens
gagtttgcagaagagagtcttcccgagaaggcagaacgagggtgtgtggagcactgcgggcgagatggagctgagggaaggcagagctgggtctcactctgttgcccaggctggagttcagcggtgcaatcccggctcactgcagccttgactccgtgagctcagggactcatgaagtggcagctaagccctgtccagtggccacccgtcagccaagggccagagaccaggaaaggaagaaaggcagcttcacttcctctttgaggatggagtcgcacagccgcgctggaaagagcagaaaatctgcaaaatttcggtccatctccaggtccctgatgctctgtaatgctaagaccagtgatgatggctctagccctgatgagaaatatcctgatccctttgagatttccttggcccagggcaaggagggaattttccactcatctgtgcagctggcagacacatcggaggctgggcccagcagtgttcctgatctagcactggcctcggaggctgctcaactccaagcagctgggaatgatcgaggcaagacctgtaggaggatattcttcatgaaggaatcttccacagcttcctctcgagaaaagcctggaaaactagaagcacaaagtagtaacttcctgtttcctaaagcctgccaccaaagggcacgcagcaactcaaccagtgttaatccctattgcacaagagaaattgattttccaatgaccaagaaatctgcagcgcccacggacaggcagccttactctctctgcagtaacaggaagtccctctctcaacaattggactgtccagcaggaaaggctgcgggaacttcgagaccaacacggtccctgagcacagctcagctcgtgcagccatctgggggcctccaggcttcagtcatctccaacatcgtgctgatgaagggccaggctaagggtctgggcttcagcatcgttgggggaaaagacagcatttatggccccattgggatttacgtcaaaaccatttttgcagggggagcagcagcagccgatggaaggctacaggaaggtgatgaaattctggagctcaatggtgaatcaatggctggactaacacatcaggatgctttgcagaagttcaagcaagccaaaaaggggctcctcaccctcaccgtgagaacccgcctgacggcgcctccttccctgtgcagccacctgtctcccccactgtgccgctccctgagctccagcacttgtatcaccaaggacagcagctccttcgccttggaaagcccctcggctcccatcagcaccgccaagcccaattacagaatcatggtggaggtttctctgcagaaagaggccggcgtgggcctgggcatcggcctgtgcagcgttccctacttccaatgcatctctggcattttcgtccacacgctgtcaccaggatccgtggcgcacctggacggacgtctccggtgtggggacgagattgtggaaatcagtgattcccctgtgcactgcctgacgctcaatgaagtctacacgatcctgagtcactgtgatcccggtccagtccccatcattgttagccgacatccagacccacaggtctctgaacagcaactcaaagaagctgtggcccaggctgtggaaaacaccaagtttggaaaggagaggcatcagtggagtctggaaggtgtcaaaaggctggaaagcagttggcacgggcggcccaccttggagaaggaacgagagaagaactcagcacccccgcatcgcagggctcagaaggtcatgatccgctccagcagtgacagcagctacatgtctgggtccccagggggaagtcctgggagtggcagtgctgagaagccgtcctctgacgtggacatcagcacacacagccccagcttgcctctggcacgggagccagtggtgctttctatagcatcctccaggctgccccaggagagcccacccctcccagagagccgggacagccacccgccgctgagactgaagaaatcctttgagattttggaagcgagagagctgctgccactgctgctaccacaggaagacacagcagggagaagccctagtgcctctgccggctgcccaggacctggtatcggcccacagaccaagtcctccacagagggcgagccagggtggagaagagccagcccagtgacccaaacatccccgataaaacacccactgcttaagaggcaggctcggatggactatagctttgataccacagccgaagacccttgggttaggatttctgactgcatcaaaaacttatttagccccatcatgagtgagaaccatggccacatgcctctacagcccaatgccagcctgaatgaagaagaagggacacagggccacccagatgggaccccaccaaagctggacaccgccaatggcactcccaaagtttacaagtcagcagacagcagcactgtgaagaaaggtcctcctgtggctcccaagccagcctggtttcgccaaagcttgaaaggtttgaggaatcgtgcttcagacccaagagggctccctgatcctgccttgtccacccagccagcacctgcttccagggagcacctaggatcacacatccgggcctcctcctcctcctcctccatcaggcagagaatcagctcctttgaaacctttggctcctctcaactgcctgacaaaggagcccagagactgagcctccagccctcctctggggaggcagcaaaacctcttgggaagcatgaggaaggacggttttctggactcttggggcgaggggctgcacccactcttgtgccccagcagcctgagcaagtactgtcctcggggtcccctgcagcctccgaggccagagacccaggtgtgtctgagtcccctcccccagggcggcagcccaatcagaaaactctcccccctggcccggacccgctcctaaggctgctgtcaacacaggctgaggaatctcaaggcccagtgctcaagatgcctagccagcgagcacggagcttccccctgaccaggtcccagtcctgtgagacgaagctacttgacgaaaagaccagcaaactctattctatcagcagccaagtgtcatcggctgtcatgaaatccttgctgtgccttccatcttctatctcctgtgcccagactccctgcatccccaaggaaggggcatctccaacatcatcatccaacgaagactcagctgcaaatggttctgctgaaacatctgccttggacacggggttctcgctcaacctttcagagctgagagaatatacagagggtctcacggaagccaaggaagacgatgatggggaccacagttcccttcagtctggtcagtccgttatctccctgctgagctcagaagaattaaaaaaactcatcgaggaggtgaaggttctggatgaagcaacattaaagcaattagacggcatccatgtcaccatcttacacaaggaggaaggtgctggtcttgggttcagcttggcaggaggagcagatctagaaaacaaggtgattacggttcacagagtgtttccaaatgggctggcctcccaggaagggactattcagaagggcaatgaggttctttccatcaacggcaagtctctcaaggggaccacgcaccatgatgccttggccatcctccgccaagctcgagagcccaggcaagctgtgattgtcacaaggaagctgactccagaggccatgcccgacctcaactcctccactgactctgcagcctcagcctctgcagccagtgatgtttctgtagaatctacagcagaggccacagtctgcacggtgacactggagaagatgtcggcagggctgggcttcagcctggaaggagggaagggctccctacacggagacaagcctctcaccattaacaggattttcaaaggtggacacagaggacttcgtgccagaggcaagatccctgtaaatattgttgcacaaaaatctcactagctctcttcccataccacccaatgctgatgtcctcaccacatgcggagaacaaatgtgaagggagtaggatattgggtcagtgtccaaagcagggtctgggcaggactcagctccccagagtcctctatgaactatggacggtgctccaggcaggctaaggcgtggagctgcctgatatttccctcccctggggacagcaagggctatccctttccaaaggccatggagagctggagcctggtgccctaacctctgagtcaccatcttaagagatgcctcattttagaaccaccaacaagcaagctcccaagggatggtgccctgttctctaccaagctatcctggctctttggagatcaaggagaggaggcaactttccttgttccccatcatctgtggaacccattaccttctccctcatttcaggagcagcctcagaacaaagtgagacagtccagcctggagatgaaatcttgcagctgggtggcactgccatgcagggcctcacacggtttgaagcctggaacatcatcaaggcactgcctgatggacctgtcacgattgtcatcaggagaaaaagcctccagtccaaggaaaccacagctgctggagactcctaggcaggacatgctgaagccaaagccaataacacacagctaacacacagctcccataaccgctgattctcagggtctctgctgccgccccacccagatgggggaaagcacaggtgggcttcccagtggctgctgcccaggcccagaccttctaggacgccacccagcaaaaggttgttcctaaaataagggcagagtcacacgggggcagctgatacaaattgcagactgtgtaaaaagagagcttaatgataatattgtggtgccacaaataaaatggatttattagaatttcatatgacattcatgcctggcttcgcaaaatgtttcaagtactgtaactgtgtcatgattcacccccaaacagtgacatttatttttctcatgaatctgcaatgtgggcagagattggaatgggcagctcatctctgtcccacttggcatcagctggcgtcatgcaaagtcatgcaaaggctgggaccacgtgagatcattcactcatacatctggccgttgatgttggctgggaactcacctggggctgctggcctgaatgcttataggtggcctctccttgtggcctgggcctcctcacaacatggtgtctggattcccaggatgagcatcccaggatcgcaagagccatgtagaagctgcatcttgtttatacctttgccttggaagttgcatggcatcacctccaccatactccatcagttagagctgacacaaacctgcctgggtttaaggggagaggaaatattgctggggtcatttatgaaaaatacagtttgtcacatgaaacatttgcaaaattgtttttggttggattggagaagtaatcctagggaagggtggtggagccagtaaacagaggagtacaggtgaagcaccaagctcaaagcgtggacaggtgtgccgacagaaggaaccagcgtgtatatgagggtatcaaataaaattgctactacttacctaccacatgccaagcactgtgctcagggctaaacgggcattgcctttagtgatcacagcagcttctacggtgtatggttctgtgccaatgtattgataagagggcacacactgtgtacagtaaatggcttatccagctggtgagtgatgcggcagattgagttttcttctgtgattcggtggagactatcagcccaagatgctttaagtgcacaacattacagggaatgcctgagtgcctggccaaagggatatttggtttggccatctctggatgcctgattgccaagctcaggaccaggcaatgtgactttgcatcagcaacaaccagcatcccttgaccaggcctgggccagagtattggtctcctctcagcccctgatcctgtgaagtaaggatgtgggggaagacctggcaaggacacagatgaaacacaaacaatagtaattctcaggccatcatcagtggagccatgttaatgtaatctgatggcttctccagggtccacaggaagtgaagaatctgtttcccagcagtggactcaaaacccatctgggctcctaaccttcctgtaaacccctttagtggcttcattagagcaggcgttcagctcactgttctattcatctcaaggaataatgggcttagagcagtttctgtcctgctggttaacttgtttggcctattccattctggattttgtcaagcagtagacaagcaattagacaagaacttggaggcaccatttgtatccactttttagacttaatagaaacattgaagatgaacataatctaccaacgaaagacgtgattcaattcaacactcccttcccatgacccaggctgggcaaggaggccacgtgatgtggagggcacattccttgcctgcacaaactcaccatctgtgcacgcagtggccttccctaaaatcagggaattgttttaagtcttatcaagcagccaagggatgaaagagaaggtgggttttcatcaagactggaaggtggggacagggatgagcatggagctggccgtgggcctggggtaccaagagactccttgagagaccaggcaaagcaagtgattgggacagaggttatctgtcccaggttatctgggcatagatgcaggtgagcccatggccctcccagtacctcctgtctctggcctgttttagaaggttctctcctccccaaggagacacaacaactcctagggccactgaagatataactattgcccaggtttctggtctctaggctggggaagtcctctgggtaggaatcagcaagaagatcctaaaacaaaagctcatccatttgcgttccatgatgctgggatttacacttgaggcttagctttgctctgccaacttcttcagagctgacacaggatgaaggcaatgccatcctcaaacactgcaggcatcacagctaacaattgtgaagtcgtcttaactcaccataaaaaggaatccactcccaggcagccctacttctttgctttgcccagcattttactgattcatacattatctcacttgtgccaacactcaagaagcaggctacactgacactggtattcctgcctccatattttctttaaaagacaaatcaaagcagatatattaagtgactgttcaagagcacacttggcccaagtggcagagcttggactggatgcatgttttccagctcctcatccagggctctgaccagtttaacctgatgcagtcacgtggaggagcagtgcaggcacagtatgtcccataggcccagtgagatgcattcttggttggctggccttccacttggctacacagggatgtacaaggcgatcccatcttgataagaccaccacctcagagtatggagctcagagagggcaggcatgaagtttccttggctggtgcacctagaattggctgaactcatgagaagttgatatagaacagtgcttgccacagagcggggactcggtaagcacttaatgaatgaatgaattctaagtcaatccaagagtctgatgatttcttgaaaagggtgttagctaaaggatcttaggcatgactgtagaatttgtagttgcaatagaacagagaaagaggaagctttctgtctccttaacactgagctgtcatgttttaaagcttgctcacatcttggcacatttaagagacagtcaccccaggactcaaaaatagggaagtaacagtaacgcaggggaaacgttttctgtttggaggagcaaaggctgagaacactgtgaaaacattttgcgcgcacaatagtaacctgggtaaatgcagcgtgaagggattttagtcacacgtggtctttcttacaaggaaggtggtgggggtgcagatgaggttgctagagaatgttagaggatccctctctggattggagatagggaaagaaagttgcacggctgctgaggccccttctaggtggcaaggctgtgctccctggttctgatgatgtgcctgggtggacatggcccctgtgagtttgtacagtcttgcagcaggatctagaggggggatttccagccagggctgctagacggaggcctactcttccatctttcctgatggcaggatggcctggccagggcctggaagacagagacctcctgcctccgcctcagtaagacgacaaggaaaggcaaatgcccaagggaaagaaaaggaaggctcttctccccagagttccccatgcagacatgagtgcgtgctcagttcagaatcacttctgagaactcatccctaatgctgcagatttgggctggaacagattcacactgtctggtttcaccgaggacatgaaactccaccttgcggggataaagagagaaaaacaaattcatcaaatggaagacacattgaaagtgtttttccttaatgcttatcctgtttttaaaccattatttccaagttgacaccttttttaaggaaaaataaatattttgcggcattaaagccataaaaaaaaaaaaaaaaaaaaaaaaaaaaaaaa

SEQ ID NO: 109 - DNA, 436 bp, Homo sapiens
ttttttataagcaatataggattgtctgaatttctttatttaacatatcaagggctaagaaaaagggtttctcccaaacccccatttacctttaaggctcagccagaaagccagagtcagcctggtacgagatattctggaactacaatacactgtatctcttacagagttatcaaggaaggttgcatagttacttcaggagacttaaaggaaaaaggtagatcacttcctctgaatgccatggagggatgtattatatgaccccaaacagaagacaagtgtagcatatgagcaactaaaaattctgaggctctaagaggctgacactcattttgagtttggagtgcagggagccaaagaagtggaatcacaaacagaaacaggttctataaaacatagctgagttacttgcctgctcatggtctcaataaagaga

SEQ ID NO: 110 - DNA, 529 bp, Homo sapiens
  misc_feature (484)..(484): n is a, c, g or t.
ctcccaggaatttcctagacggatcctgtaataactttcattcttagttctaagcctagatataacagacccctctgtcatcgcaatggtgttttccccaagatgagacattctttttaaggtatgtgactctaagaatgggaaagtgaggggaacaggtacagtcatgtgccacataatgacgttttggtcaataagagaccacatatacaacagtagtcccataacattaataacacaaagctgaaaaatttctatcacctagtaatgtcacagtggaagcattactcacgtttgtagtgatgctggtgtaaacaaacctgcacagccagttgtataaaagtattgcacatacaatacatgaaatacataatacttgaaaatgataacaaatgaatatgttagtggtttattgtccacgaagacctttcagtgggacggcatggggaggggaaagccagtgataatgacgatcctaaccctncacaggcctagactaacatgtgtttttgtgtcttaatgtttaaca

SEQ ID NO: 111 - DNA, 490 bp, Homo sapiens
cattctctatgacagttttattctcccataggagttccgcccaaacaaaagataaacgcaaataagtgcacagcctgcatcacagggaaggtgtgctggggaggagcacaaataaagtatcatagataacacaaaatatttatttcctaagaaataatccagtactgtgcagtcaaaatatgtccataagaaacaaaatccacctctctcacattttatttattcttctctattctcacccattttttatggaagcactttccagcaattaataatccagaaacagaatatgctattttgatgagagtatgctgttcccttccaggactaaggatgtaaacaaaagtaataggtaaagagtgtgcccagtggttcttctctcagcccaagtctgctggaaaagtgaggagattctggggcatatattaaaactgcttcccagggaactggcaatcaatcaatattgaatgatcattgagctgagcatgaa

SEQ ID NO: 112 - DNA, 844 bp, Homo sapiens
ggcgcgcggagctggcaccttggcgctgttggtggcggcggagacagctgtgaagtgtgaggttctttgtctgctggcagctaggggcgacgaggcgggacgtcatggaagtgaaggatgccaattctgcgcttctcagtaactacgaggtatttcagttactaactgatctgaaagagcagcgtaaagaaagtggaaagaataaacacagctctgggcaacagaacttgaacactatcacctatgaaacgttaaaatacatatcaaaaacaccatgcaggcaccagagtcctgaaattgtcagagaatttctcacagcattgaaaagccacaagttgaccaaagctgagaagctccagctgctgaaccaccggcctgtgactgctgtggagatccagctgatggtggaagagagtgaagagcggctcacggaggagcagattgaagctcttctccacaccgtcaccagcattctgcctgcagagccagaggctgagcagaagaagaataccaacagcaatgtggcaatggacgaagaggacccagcatagaagagcacagctggccccggcgtttcatgaagtcagaaggcctggcagccatttcctggacgttgagaggattgtttatttgatttttatcctcatcccagcaggcctggctttgtggttagttgggtacatcacaaaaataagttaaaaagaaatatttgtgccttggggagaagaaacatggtgaaaacaggctgaggttgtcagggcagagagctgaaggtggggacagtgaccgcggacccctctgtgcttgaaagatttcctccacggcctttgccccagttggtggg

SEQ ID NO: 113 - DNA, 393 bp, Homo sapiens
  misc_feature (318)..(318): n is a, c, g or t.
tttgcagttgggaatattttattagtgagttcactttgactgtaaatggcaaaaacttaccagagctagcttaagaaaatggggaatttagtacaagaatatgacgatgtttcaaggaaccacagggcagaggttcaatcaggccttggcagggagcttttgtcagaagagaatggagcatcatcagttagaagagaaaaagtcttcagaggtaaaggcacccacatgtgtgtaagtcaaggagatgatgaaaaccaggcacacatggactaaagagtgtcatccccgccatcttgaattctctcttgatgttcacancatagccttgttatgagttttctacttttagattcaacccaggaggctttccttatttcttcttacataagactc

SEQ ID NO: 114 - DNA, 4440 bp, Homo sapiens
gacaagcccttatctgatcccagctccgggtttaagagtcctggcccggcccgtcgcacagctctgctcctaactcctgcccgccccgtccgtccatctgtcccgctgccccgcggcccatccaaggggccactccacctcggacccaagatgacgtcagttgccaaggtgtattacagtcagaccactcagacagaaagccggcccctaatgggcccagggatacgacggcggagagtcctgacaaaagatggtcgcagcaacgtgagaatggagcacattgccgacaagcgcttcctctacctcaaggacctgtggacaaccttcattgacatgcagtggcgctacaagcttctgctcttctctgcgacctttgcaggcacatggttcctctttggcgtggtgtggtatctggtagctgtggcacatggggacctgctggagctggaccccccggccaaccacaccccctgtgtggtacaggtgcacacactcactggagccttcctcttctcccttgaatcccaaaccaccattggctatggcttccgctacatcagtgaggaatgtccactggccattgtgcttcttattgcccagctggtgctcaccaccatcctggaaatcttcatcacaggtaccttcctggcgaagattgcccggcccaagaagcgggctgagaccattcgtttcagccagcatgcagttgtggcctcccacaatggcaagccctgcctcatgatccgagttgccaatatgcgcaaaagcctcctcattggctgccaggtgacaggaaaactgcttcagacccaccaaaccaaggaaggggagaacatccggctcaaccaggtcaatgtgactttccaagtagacacagcctctgacagccccttccttattctaccccttaccttctatcatgtggtagatgagaccagtcccttgaaagatctccctcttcgcagtggtgagggtgactttgagctggtgctgatcctaagtgggacagtggagtccaccagtgccacctgtcaggtgcgcacttcctacctgccagaggagatcctttggggctacgagttcacacctgccatctcactgtcagccagtggtaaatacatagctgactttagcctttttgaccaagttgtgaaagtggcctctcctagtggcctccgtgacagcactgtacgctacggagaccctgaaaagctcaagttggaggagtcattaagggagcaagctgagaaggagggcagtgcccttagtgtgcgcatcagcaatgtctgatgacctgttcccactcccccattcctctggtctcttttcctctcttccaatgccctggtaaggaatactacccgggtttactggagatcccccgaagcacccatcctccactccctcttctttaacccagtggcctgttggtagcttaggccaactggagtccaggttcgcctcccactgtcccctttccacttccccagcttctgccccaatacacatacctcccttaagccaggatgggggaaagagtgggattaggctgaagtggcttagaaggcctcagccatgcttggatactcacattaggaggaccatgtggttggaaggatagactgccccctacctcccaccaccaccatgaagtttggtgacttgaggctggagctccctctgttacctttccatctagcaagttcccaaaggcaagactctctctgatggtcactttgtggtctgtgctttcagaaatacaggaatctgatatcaacatatcctagggtttctaccaatctctgttgaaagaagccagggtttgccactgtgaagcttgatttctgctggtgacttctgaccataagctagaaccatggtcgccactgttttccctctgtagtttctcaagtgaacactctcaggatacccagttccctcatagcctctgttctcagagaattggagttggcccaagaaacataaacatataaccacccatatctatcctggattctgaactcttcaatttggagtgactaacacaagttgttatctaaacctttaaacctatcttccaggcagcccagagaagatctgtttccctgtgtcctgtgaatggaaggacccaagccaatatgttcctttgaaaagagtccagtacccaggccccatggaaaggtctgaaaataatattccagattacactgtacctggcttctcttcttcctttcctgctcagcctagatccttcttccttaaccccaactctttgggagaagggagggaaaatgcaagggccttcctctcttaacacggatgctcaagtaaaactagattcacagggcacagattccccagaaagttaacacaatcccaccatgagggatgggtaaattctcagatttccaaactgctgtacagagcctctgagaattggtgatgctttgttaaggtttgggcaggagcagaactctgtggctggcagccactattctcagttacacctcccagtgcccttctgaaaagtgccagctatttcattaggcaatgctggaaggaaatgaaattataccttctgatcaaataaccatggcttccctcagccattcctgagacttggtataaaatgaagaaatcagtgtcatctctactctcctctgccatgaggccattttcagacaagttaaaaagtagactttaagagatcaaactcagcctattccttgttccctggtggggtctgtggtaagggtcagggaagggcatataggcaccagagctttatccaaagccccaaatccctagagtgctttctggtctcactttggtaccaaggaagcctcacatagtggtactgcatagtcccactataagtcaagttgcagtttaaggtggtctcagccaattgttacaagctacagaatatatacatgcatctatgtacagagccttgcagagaaacacaaaattttgaggctagacccatgatcaccaccaactataattgcacaaggtcttgttatattgatctctcctcgaactcaactaactatatcttgaaaacaaagacccttcggtgtccatctacagtaaaccccaccattaccttctagttggcataaaaacaagaaccacaaaaacttgaaaaatctgaaacagagaacagaaggccaagagccagcttctgcgttctcaactttattcaacattagacttaccttatttctttcagtgtgtagggacaagatgtactgctgtgtgtgtgtgtgtgtgtgtgtgtgtgtgtgtgtgtgtgtgtgtgtgtgtctataccttcctatccattgccaagttaacctccatctggtttatttggccatgctatgctttcttcccattcccctgctgtctattctaagcccccagactcaagcctctagactcttggatgaaacagtgagaagaaaacattttctgacttacccttttggaatctcctccattattacccaggctttgctttaagttgcactttaaatcacactgtcctattaatgcgatctggcatcttctcccacaagccccctacagggaacaactaccccctaccttaactctaaatggttctttagactatagtctgtctcctctgacctgaaatcctcttttaggcaataggccgagctttagaagcagccaggtctggtgagaaatgggcccccataccaactgtggacttggaatatcagcagagtagtaggcacagttgtaaaaaggggagatttcggtaggcacaggtgtaaaaaggggagatttcagaagacgggcgaaacaactgatgggggaagatacctggggtgagaagatgagaaagaaatgatgctgagggacctagtgaaatcaatgaaactcttgagtcttgcttaggctcgcaaacaagaagtggggaggcttgggaaattaggatatgacatatatgaaaggtttatctaagaagaaagaaacagagataatatatatatagaaagatgtatatagatgtatatatgcccaaatatattgaatgtacagaaaggaaatattcagagactttagcattgggggcagatatcttggcctggttatggggtaggacacccagattttcagacttacaatcagtggtcctggtttcaacatggaagtgagatagctgatgaaggatttcaagtctggaaatgggaaagggaggggtagaagttccttttcagaaataaagaggcattcatgaaggcttttgttgaatcctatgctactgataggaccaggaagagaggaactcggaggacaatagggaggggaagtcttggaaaatctaccacttacactgtgtgtccccatccccagcagcgtcctgccactgtagcgcctttttaaaataaataaaataaaataaagcaccattttgtttccctttca

SEQ ID NO: 115 - DNA, 533 bp, Homo sapiens
tttgtattaagattttaatagagagataatcatgggattggacaaaatccaagccactatgatgaaacacttaaaactcggaaagaatacattaacattgagagagaaagttggaaatcaaatagaacgatgagtggttgggaggaaagcaatgctgaatggaattccaaaatattgaccttagtcattatcacatctacttctagctacctctttttggaaagggatggtctggggatacattagaagccacatgttagaagtcaaaacaaaatagaattaaatacatatctttattgactaaaagggacatcatagtcttatcatattgtgggatatgtatgcagatttgtagaatgaaactgaacactaagaagctgtagggctaccagggatagaatcaagttgatggtgaatgaggcagtaaacaaggcaccagagcaacaaccctaagaaagaatatctggaattcatcaggataaaaaataagacttggcaatagcttagacgtgaaggaagtgctcacccaattt

SEQ ID NO: 116 - DNA, 276 bp, Homo sapiens
tttttttttttttttagcacgagcccatttttataattaaaaaaaagggtgtacacttataaaagcagcagaaatatttggaaggaaaccatgcccctgctctgaaagaacaggacggtagagcaagaagaaaatgaagcaggctgggactccctgagcagcgcagtgagtagccagcctgccgcccatcagtgggaggtggcaggagagggacgggtgagcagggcccactgcctatgagcagggcactggccccagccggggctggggaggagc

SEQ ID NO: 117 - DNA, 1124 bp, Homo sapiens
gccgctgccaccgcaccccgccatggagcggccgtcgctgcgcgccctgctcctcggcgccgctgggctgctgctcctgctcctgcccctctcctcttcctcctcttcggacacctgcggcccctgcgagccggcctcctgcccgcccctgcccccgctgggctgcctgctgggcgagacccgcgacgcgtgcggctgctgccctatgtgcgcccgcggcgagggcgagccgtgcgggggtggcggcgccggcagggggtactgcgcgccgggcatggagtgcgtgaagagccgcaagaggcggaagggtaaagccggggcagcagccggcggtccgggtgtaagcggcgtgtgcgtgtgcaagagccgctacccggtgtgcggcagcgacggcaccacctacccgagcggctgccagctgcgcgccgccagccagagggccgagagccgcggggagaaggccatcacccaggtcagcaagggcacctgcgagcaaggtccttccatagtgacgccccccaaggacatctggaatgtcactggtgcccaggtgtacttgagctgtgaggtcatcggaatcccgacacctgtcctcatctggaacaaggtaaaaaggggtcactatggagttcaaaggacagaactcctgcctggtgaccgggacaacctggccattcagacccggggtggcccagaaaagcatgaagtaactggctgggtgctggtatctcctctaagtaaggaagatgctggagaatatgagtgccatgcatccaattcccaaggacaggcttcagcatcagcaaaaattacagtggttgatgccttacatgaaataccagtgaaaaaaggtgaaggtgccgagctataaacctccagaatattattagtctgcatggttaaaagtagtcatggataactacattacctgttcttgcctaataagtttcttttaatccaatccactaacactttagttatattcactggttttacacagagaaatacaaaataaagatcacacatcaagactatctacaaaaatttattatatatttacagaagaaaagcatgcatatcattaaacaaataaaatactttttatcacaaaaaaaaaaaaaaaa

SEQ ID NO: 118 - DNA, 389 bp, Homo sapiens
tttttttttttttttttttaaaacaaggtcttgctatgttccccaggctggtctcaaactcctgtactcaagcaatcatcctgcctcagcctcgcaaactgctgagatgacaggcgtgagccatcacgcccagacctgctgtatataactttcgacttccaaaaaggtaaccactgttgactggaagctttactgataacagaaaaagctgatatatatatatagtatgttttcgttattaatttacctattttgaatgtatcatgtgtttttaatgtgcatttctctgacaataatgttaacaacattgaacatattttcaagtgatattggacattaatatatcttctttgctaaagcatcttccgcatactttactctcatttatt

SEQ ID NO: 119 - DNA, 454 bp, Homo sapiens
tttttttttcttctgtaacagctttattgacataaaatcatacatttcatctcatttaaagtgtataaatcagtggtttttagtatattgagttgtgcaaccatgactacaatctaactctagaacattttcattgccccaaaagagaatcccatactcatcagcagttactcccccatggttggcaagtttttgggctctattcttgagtttttttatgttgtcatacaccaggtcagattgatttaggtaaaaacaacactcttcatttaagaatatacagatgttctccttttccagcagtaagtcaaggcctcggcggttttggaggacaactgcagctagagtcaacttgggcctggaggactgatgaagtttgtgatatgactgtgatgctagcagagaattcattagagagactatggaaggtcctgacagaggttgaaatgcctgc

SEQ ID NO: 120 - DNA, 501 bp, Homo sapiens
tcttcgcttggaagaaagcgtgagatcacgctttgttttcttttgttgtttgttttgttttttttttctgagggaagccttagcttaatgtatgccggtccttcaaaagacatgatagcaatttgagagtctgaactgtaagtttttgttactttattcgttcaccaaatgtttttatggaagccttgccacgtggaacatgtgtcccgggttttaaaaaatgaatttgactcaccagctaacactgaaaaaataatgtacagcctagaaggaaagatcaaagtgtaaaagtggttagtcctgtcgcctcctgagcatttttgtattatatcacttggtttttcgtctgaagtggctgtaaataatcgtattaaaaatcttctggtccagacgcaggaaaaccttttccggtataaagcccaccttcctctaatgttgcgcatgcccactgtgcccagctgctccgctttcgtgcatcccagacttctgtcaccaggtaag

SEQ ID NO: 121 - DNA, 499 bp, Homo sapiens
  misc_feature (378)..(378): n is a, c, g or t.
tttttttttttttttttttttttttttttttttttttttttttttttttttttttttttttttttttttttttttttttttttttttttttttttttttttttttttttttttttgggggaaaaaaaaaaaaaaaccgaaatttcccaaaaaggggggggggggggggaaaaaaacccccccccaaaaaaaacaaaaaaaaaaattttttccccccccccctcccctttttaaaaaaaaccccccccccccccccggggggggggggggggcccccccgggggcccggggtttttcccaaaaaagggggccccccccccccaaacccggggggggggggggttttttctgggaaaaataccccccgggggggaaaaancccccccggccccccttgggggaccccccacgggggaaaaaccccccccggcccccccggggggaagggagaaaacgggcgggtctcttccccagggggggggggcccccaagggcccaaa

SEQ ID NO: 122 - DNA, 428 bp, Homo sapiens
agtttaaaacatcagatatttattctcacagttctggaggccagaagtctgaaatcaaggtgtcagctgcattggatccttctggaggctcgaacagagaatctgttatctcctggcttctggtggctgctggcaattcttggcattccttggcctgtagatgcatcactccaatatctgcctctgtcttcacattgtcttctccttggtgtgtttctgtctatttttccctctcttctcttctaaagacttgtcattgggttagagcctgcagtgaatgttgagagcttgcagaaacaaagacgaaggcatttggcactgagtggaggaaaacaaatggatttcccagggcaggcagttcttgatcacagagaacccacagatgtgaacaggtaaggcaaaccctgggcagctgtgccagataggac

SEQ ID NO: 123 - DNA, 536 bp, Homo sapiens
tcaagagaaattatttatttatattacttatatcatacatattaatgtatagcattatctatatttattttttacttattattgggagtaaggggaagaacttgaactagtaacatttctaccagaacttcacagtaccggtgttttcgctttattttaaactagccatcatgaaaaatctgatttaatactttcaagcactttcagttatgactattcaatcatgatatgaatcagcaaattggttgctccattaaactgcttttaagactaccaaaaacttgcccagctcttctgtcatacctttagcagaggaaatggaagaagctattacaaggacgcctgaaaacttgaaaagtttcaaaacctggacaattactcaacagcattttcctctgaaagacattttgtagacgtttcccatgattatctcctattccggatggcccatcaaatcacattctaaacaggcattcaacacttattaagcagccactgtgtgcagagacagcactatactaagcaaaggagcatag

SEQ ID NO: 124 - DNA, 266 bp, Homo sapiens
tttttttttcagaagaaaaataattccatgtcacctttattgggtcagctccattaaaaaaaaaaattgtcaaagccagaccagaagtcattttcaaggggtcacaacaaatggggtgtctccctcgctgcagtgcagcaccctgatgctctgctccgccctctaaccagcgtcacaccctctccagggggcacagggagagacgtggcagcacaaccagacagactcattacacctaaaattatgagtggcacagctcttccaga

SEQ ID NO: 125 - DNA, 458 bp, Homo sapiens
ttctcagcaaggcaatttacttctgcagaagggtgctgcctgcatcaatcatgatcacaggagcacactgaacaaaggaaggaaaaggtttttatccctaacacagtccctacctctgtgtcactcccccaggggctggggttggaccgctcattctaagttgacccgattggctatttgtgaatacttttccaaataaggaagggaagggggatgtgagttacagtggtgggaagtgcagtttcagtgggaagaatgggtgcagagtgggtaaccaagggagcagatgtgagttattgattagaactggtgggaaggttgttcacagtaactagggacaaggaggcatggacaacaaggaagtcgagtttgagaacaaagaataaggaagtcaacaggctaaatctttgaagaggaatttactgtatcttataatttccccctttcaattgttatgg

SEQ ID NO: 126 - DNA, 565 bp, Homo sapiens
attgggggaggggtccccttatttatttaatcatcgctccccaaggctaaactggtggcctggcaacagtgagtattttctctgagctcagaagccaactccaagtgttcagggtgaacaggttgggaaacttgagaaccacacagacatcaggaaaaattccgtgagtggttgtctgtggtgaaatgatgatatggccctgagtttgctctccccaggagaacttggaagctgcccccttttccacctcccacctcacttggaactaagtaaaccaagaaattctaggaagcagcccaacctgaaagagctggcttctccaggaaaagagaggggagggtgaagagacccagggtctgtccgtcccaaggggatggtcagtcacagaagtcactgaccagcactccaggccagatctcactggtccggccacagatttttctaatcctgtgagttgaaccgcacccaaatgactgcagatgggatcagagatggaggtctcaccagtcagaggaaaagcatccaagtatcaggagagatgcatagttccaagaggagccatcta

SEQ ID NO: 127 - DNA, 269 bp, Homo sapiens
ctcctcctccgctgcagtgctgtctgtggcaactgaaaccaaaggtgataacgactggagctcaggacaggctgtttctccaagaggagtgtgaagaagtcccgggaatcaacattttgagagcatcccaggggcctctaagaatatattacgggcaaacacttgtagagcacttcatttcatcctcaatcaccgttacgaggcagacacaatcatctccgagtgaaactgaggctcacaggggcgggctccgttgccgaaactcacag

SEQ ID NO: 128 - DNA, 4188 bp, Homo sapiens
gccggggaacaagccacaggagagcgactcaggaacaagtgtgggagaggaagcggcggcggcggcgccgggcccgggggtggtgacagcaggtctgaggttgcatcataaatacaaaggactgaagttataaaagagaaaagagaagtttgctgctaaaatgaatctgagcaatatggaatattttgtgccacacacaaaaaggtactgaagatttaccccccaaaaaaaattgtcaatgagaaataaagctaactgatatcaaaaagcagagcctgctctactggccatcatgcgtaaaggggtgctgaaggacccagagattgccgatctattctacaaagatgatcctgaggaactttttattggtttgcatgaaattggacatggaagttttggagcagtttattttgctacaaatgctcacaccaatgaggtggtggcaattaagaagatgtcctatagtgggaagcagacccatgagaaatggcaagatattcttaaggaagttaaatttttacgacaattgaagcatcctaatactattgagtacaaaggctgttacttgaaagaacacactgcttggttggtgatggaatattgcttaggctcagcctctgatttattagaagttcataaaaaaccacttcaggaagtggagatcgctgccattactcatggagccttgcatggactagcctacctacattctcatgcattgattcatagggatattaaagcaggaaatattcttctaacagagccaggtcaggtaaaactagctgattttggatctgcttcaatggcttctcctgccaactccttcgtgggcacaccttactggatggctccagaggtgatcttagctatggatgaaggacagtatgatgggaaagttgatatttggtcacttggcatcacttgtattgaattggcggaacggaagccgccccttttcaacatgaatgcaatgagtgccttatatcacattgcccagaatgactccccaacgttacagtctaatgaatggacagactcctttaggagatttgttgattactgcttgcagaaaatacctcaggaaaggccaacatcagcagaactattaaggcatgactttgttcgacgagaccggccactacgtgtcctcattgacctcatacagaggacaaaagatgcagttcgtgagctagataacctacagtaccgaaaaatgaaaaaaatacttttccaagagacacggaatggacccttgaatgagtcacaggaggatgaggaagacagtgaacatggaaccagcctgaacagggaaatggacagcctgggcagcaaccattccattccaagcatgtccgtgagcacaggcagccagagcagcagtgtgaacagcatgcaggaagtcatggacgagagcagttccgaacttgtcatgatgcacgatgacgaaagcacaatcaattccagctcctccgtcgtgcataagaaagatcatgtattcataagggatgaggcgggccacggcgatcccaggcctgagccgcggcctacccagtcagttcagagccaggccctccactaccggaacagagagcgctttgccacgatcaaatcagcatctttggttacacgacagatccatgagcatgagcaggagaacgagttgcgggaacagatgtcaggttataagcggatgcggcgccagcaccagaagcagctgatcgccctggagaacaagctgaaggctgagatggacgagcaccgcctcaagctacagaaggaggtggagacgcatgccaacaactcgtccatcgagctggagaagctggccaagaagcaagtggctatcatagaaaaggaggcaaaggtagctgcagcagatgagaagaagttccagcaacagatcttggcccagcagaagaaagatttgacaactttcttagaaagtcagaagaagcagtataagatttgtaaggaaaaaataaaagaggaaatgaatgaggaccatagcacacccaagaaagagaagcaagagcggatctccaaacataaagagaacttgcagcacacacaggctgaagaggaagcccaccttctcactcaacagagactgtactacgacaaaaattgtcgtttcttcaagcggaaaataatgatcaagcggcacgaggtggagcagcagaacattcgggaggaactaaataaaaagaggacccagaaggagatggagcatgccatgctaatccggcacgacgagtccacccgagagctagagtacaggcagctgcacacgttacagaagctacgcatggatctgatccgtttacagcaccagacggaactggaaaaccagctggagtacaataagaggcgagaaagagaactgcacagaaagcatgtcatggaacttcggcaacagccaaaaaacttaaaggccatggaaatgcaaattaaaaaacagtttcaggacacttgcaaagtacagaccaaacagtataaagcactcaagaatcaccagttggaagttactccaaagaatgagcacaaaacaatcttaaagacactgaaagatgagcagacaagaaaacttgccattttggcagagcagtatgaacagagtataaatgaaatgatggcctctcaagcgttacggctagatgaggctcaagaagcagaatgccaggccttgaggctacagctccagcaggaaatggagctgctcaacgcctaccagagcaaaatcaagatgcaaacagaggcacaacatgaacgtgagctccagaagctagagcagagagtgtctctgcgcagagcacaccttgagcagaagattgaagaggagctggctgcccttcagaaggaacgcagcgagagaataaagaacctattggaaaggcaagagcgagagattgaaacttttgacatggagagcctcagaatgggatttgggaatttggttacattagattttcctaaggaggactacagatgagattaaattttttgccatttacaaaaaaaaaaaaaaaaagaaaacagaaaaaaattcagaccctgcaaaaccacattccccattttaacgggcgttgctctcactctctctctctcttactcttactgacatcgtgtcggactagtgcctgtttattcttactccatcaggggcccccttcctccccccgtgtcaactttcagtgctggccaaaacctggccgtctcttctattcacagtacacgtcacagtattgatgtgattcaaaatgtttcagtgaaaactttggagacagttttaacaaaaccaataaaccaacaacaaaaaaagtggatgtatattgctttaagcaatcactcattaccaccaatctgtgaaagtaaagcaaaaaataataataataaatgccaagggggagagagacacaatatccgcagccttacaccttaactagctgctgcattattttattttattttatttttttggtatttattcatcaggaataaaaaaaacaaagttttattaaagattgaaaatttgatacattttacagaaactaattgtgatgtacatatcagtggtgacatattattacttttttggggacgggggtgggtggggtgaagagatcttgtgattttagactgctgcagagttaacttgtctcagcatatctgatgtatcataatcatttctgctgtgcagaggagggatacacttaggggctcacagatcccagtagcacaattgggctttggcaaatgggtattttgtgtatagaggaatttaaggagaggtattacttattttcatattgtattttaactgtttctcggatcaaattttttaacttcttcttcgtgttcttccccacctccttccttttccagttcagtatttggagttcaacactgtctctcaatcagatcatctggatctttttctttatctcccttccccttcctaagtcccatttcttggtcataaatattgcattattcacactttcaaactgtgtattttcttacaataaaaaatgatgaaaaaaaaaaaggctttacttcttttgcatgcactttaaaaacaaaacaaaacatttttcaggttccaaggaagagcatgataactgtcagagcttttaattatatttgtaaataaaagtgttcatcacaaaaaaaaaaaaaaaaaaaaaaaaa

SEQ ID NO: 129 - DNA, 344 bp, Homo sapiens
tttttttttttttttttatttatgttttacataggtttaatagcaacctcatcaatggtataatgctcactttcagtactgaaagttatgtaggacaagttaaacaaagccagccctctgtaagtgtataatataagggagcatatacttttatgcaaagacctaatgtctgtaacacagagatgtaatcctgtcagcctcctgttcaataccctttgatgtgtctccaccagcttgcagaataaaatccagaattcttagtccagtagtcagccctatgccatttcatccaaactcctctttttgtcttgagtaacctatgctggatgctgtgagaaactact

SEQ ID NO: 130 - DNA, 3339 bp, Homo sapiens
cgccgctcgccgcccgcgggttccattgagaaaagccgagcggccgcggcggcggcggcgagtgcgcgggagcggaggagccggcacccgcccgtcgggcagtccgcgcgcccgcaacgcaggaccgtggcctctcgggcctccgcggcagctccagcggctccggggctgggcgcgcgggctgggggcgcgggccggggcggccgcggagaccgggggccgggggcatgagcggccccgcggccccgccgcgcccccgccgcccgccgccgcccgcccggggctagaggcggccgccgggagggcgcgcggcgccggagacatgtccaggcggaaacagagcaacccccggcagatcaagcgttccctcggagacatggaggccggagaggaggtgcagttggtgggtgccagccacatggagcaaaaggccacggcacctgaagccccgagccctcccagcgcagatgttaactcacccccaccgctgccgccccccacatccccaggaggccccaaggagctggaaggacaggaaccagaacccaggcccacggaggaagagccgggcagtccctggagcgggccagacgagctggagccggtggtgcaggatgggcagaggcgcatacgggcccgactcagcctcgccacgggcctgtcctggggcccgttccatgggagtgtccagaccagagcctcatcccccaggcaggcggagccgagcccagccctgaccctgctgctggtggacgaggcctgctggctgaggacgctgccccaggccctgactgaggccgaggccaacacagagatccacaggaaggatgacgcactctggtgcagggtcaccaagccggtgcctgcggggggactcctgagcgtgctcctcacggccgagccccacagcacccccggccaccctgtgaagaaggagccagcagagcccacgtgcccggcccctgcacacgacctccagctcctgccccagcaggccgggatggcctccatccttgccaccgcagtgatcaacaaagacgtcttcccctgcaaggactgtggcatctggtaccgcagcgagcgcaacctgcaggcgcacctgctctactactgcgccagccgccagggcaccggctccccggccgcagccgccacagacgagaagcccaaagagacctaccccaacgagcgcgtctgccccttcccccagtgccgcaagagctgccccagcgccagctccctggagatccacatgcgcagccacagcggagagcggcccttcgtgtgcctgatctgcctgtcggccttcaccaccaaggccaactgcgagcggcacctcaaggtgcacacggacacgctgagcggtgtctgccacagctgtggcttcatctccaccacaagggacatcctctacagccacttggtcaccaaccacatggtctgccagcctggctccaagggtgagatctactcgccaggggccggacacccagcaaccaagctgcccccagacagtctgggcagcttccagcagcagcacacggccctgcaaggccccctggcctccgcggacctgggcctggcgcccaccccatcgccaggactggacagaaaggccctggccgaggccaccaacggagaggccagagcggccccccagaatggaggcagcagcgagcccccggcggcccccaggagcatcaaggtggaggcggtggaggagccggaggcggcccccatcctgggccccggagagcctgggccccaggccccgtcgcggacgccgtcgccgcgcagccccgccccggccagggtcaaggccgagctgtccagccccacgccgggctccagcccggtgcccggcgagctgggcctggccggggccctgttccttccgcagtacgtgttcgggcccgacgcggcgccccccgcctcggagatcctggccaagatgtccgagctggtgcacagccggctgcagcagggcgcgggcgcgggcgccggcggcgcgcagaccgggctcttccccggggcccccaagggcgctacgtgcttcgagtgcgagatcaccttcagcaacgtcaacaactactacgtgcacaagcgcctctactgttcaggccgccgtgcgcccgaggacgcgcctgccgcgcgcaggcccaaggcgccccccggcccggcccgcgcgccccccggccagcccgccgaacccgacgcgccgcgctcgtccccgggccccggagcgcgcgaggagggggctgggggcgcggccacgcccgaggacggcgcgggcggccggggcagcgagggcagccagagcccgggtagctccgtggacgacgcggaggacgaccccagccgcacgctgtgcgaggcctgcaacatccgcttcagccgccacgagacctacaccgtgcacaagcggtactactgcgcctcgcgccacgacccgccgccgcgccgaccggccgcgcccccgggaccccctgggccggccgcgcccccggccccctctcccgccgcgcctgtgcgcacgcgcagacgccgcaagctctacgagctgcacgcggccggcgccccgccccccccgccgcccggccacgcccccgcgcccgagtcgccgcggcccggaagcggaagcggaagcggccccggcctcgcccctgcgcgctcgcccggccccgcggccgacggccccatcgacctgagcaagaagccgcggcgcccgctccccggagccccggcaccggcgctggccgactaccacgagtgcacggcctgccgcgtgagcttccacagcctcgaggcctacctggcgcacaagaagtactcgtgccccgctgcgccaccgcccggcgcgctcggcctgcccgccgccgcctgcccctactgccccccgaacggcccggtgcgcggggacctgctggagcatttccgcctggcgcacggcctgctgctcggcgcgcccctggccggcccgggggtcgaggcccggacgccggccgaccgcggcccctcgcccgctcccgcccccgccgcctccccgcagcccgggtcccgtggcccccgggacggcctcggcccggagccccaggagccgccgcccggcccgcccccgtccccggccgccgcgcccgaggccgtgccgcccccgccggcgcccccctcctactcggacaagggcgtccagactcccagcaagggcacgccggcgccgctgcccaacggcaaccaccggtactgccgtctttgcaacatcaagttcagcagcctgtccaccttcatcgcccacaagaagtattactgctcctcgcacgccgccgagcacgtgaagtgagc

SEQ ID NO: 131 - DNA, 7413 bp, Homo sapiens
gcggccgcagagcaagaggcccaggaaggatcctccgagcgctgtggggagcggcaacgccggtggctcggggccccgcggaaaaggagctgaaggtggtggatcatcgtctggaaatgtgtctggggttgcccctgctgcccctgcagggggctcgcgctcctcctcccggaacttagggtcttctggtggcgagaaggaagaaggcaaaaaggtccggcggcagtgggagtcgtggagcacagaggacaagaacaccttcttcgaggggctgtacgagcatgggaaagactttgaagcgattcagaacaacattgcgctgaagtacaagaagaaaggcaagccagcaagcatggtgaagaacaaggagcaggtccgccacttctactaccgcacctggcacaagatcaccaagtacatcgactttgatcatgtgttctctcgaggcctgaagaagtcatcccaggaactgtatggcctgatctgctatggcgagctgcgcaagaagattgggggctgtatggatgacaagaatgcaacaaagctgaatgaactcattcaggttggggccaccactgtacgttacaaagggcggaacctgcggatcaaagcgcccatgtgccgggccctgaagaagctgtgcgatccagatggcttgagtgatgaagaggaccagaagccagtgcgcctgcctctgaaagtccctatagagctacagccgcggaacaaccacgcctgggcccgtgtgcagagccttgcccagaacccacgcctcaggatgatcgtggagctacatcgaaaggtctccagcctcatcgaattcttgaagcagaagtgggcgctccatgaggtgcgagttcggaagacactcgaggagcggcagctgcaggactcatgctccgcaccgatgcaggagaaggtgacactgcacttgttcccaggcgagaactgtacactgacaccgctgccgggcgtggctcgcgtggtgcactccaaggccttctgcacagtgcactggcaggagggcggccggtgcaagcagagtgccaaggacgcccacgtgctgcccccagcccagatcctgggcatccagagtgggcagggcacggcccggggccaggtgaaatgcccgcggagcggagctgagggcaagggtgtggggcggccccctcctgcggctgacgccttgcagagctccggagagagttcccccgaaagcgcccccggggagggggctgccctaagcttgagcagcccggacgctcctgacaggcctcctcccaggcaccaggacactgggccatgtcttgagaagacccctgcagaaggcagggacagtcccacccgggagccaggggccttgccgtgtgcctgtggccagctcccagacctggaggacgagctctcgcttctagaccccttgccccgctacctaaagtcctgtcaggacctcattgtccccgagcagtgccgctgtgcggacacacggcctgggagcgagcagccccctctgggcggggcggcctccccagaggtgctggctcctgtcagcaaggaggctgctgaccttgctcccactggcccatccccgaggcccggccccgggctcctgctggatgtttgcactaaagacttggcagatgcacctgcggaggagctccaggagaaggggagccccgcggggcctccgccgtctcagggacagcctgccgccaggcccccgaaggaggtccccgccagccggctggctcagcagctccgtgaggagggctggaacctgcagacctccgaaagcctcacgctggccgaagtctacctcatgatgggcaagcccagcaagctgcagctggagtacgactggctggggcccggccgccaggacccccgccccggctccctacccaccgccctccacaagcagcgcctcctcagctgcctcctgaagctcatttccaccgaggtcaaccccaagctggctctggaagcaaacaccatctctacagcctcagtaaggcccgcccaggaggagcagtcgatgacgcccccagggaaggtggtgaccgtcagctctcgcagcccccgctgccctcggaaccaggcctccctccgcagcagcaagaccttcccgcccagctctgcaccctgctcctcaggtttgagaaaccctccaagacccctcttggtgcctggtccctccagcacaggaagcaatgactcagatggaggcctttttgctgtcccgacaaccttgccacccaacagccgacacgggaagctcttctctcccagtaaagaagcagagctgactttccgccagcatctgaactccatcagtatgcagtcggatttcttcctgccaaagccccggaagctgcggaaccggcacctgcggaagccactggtggtccagagaacactgctccctagaccatcggaaaaccagtcccacaacgtttgttccttctccatcctgtctaactcttccgtaactgggagaggttcgttccggcccatccagtcttctctgaccaaagcagctctgtctcggccgatcgtgcccaaggtccttccaccccaggccacgagtcacctggccagtgctatcgacttagcagctacaagtgccggcatcctttccgggaaccccctccctgccttggacaccgagggcttgtctggcatctctccactgtcttcagacgaggtgacgggtgccatctcggggcaggactctactggaactcaccaggatggagacaccctccccaccgtggggggctccgacccatttgtcagcatcccttcgaggcctgagcaggagccagtggcagacagtttccagggctcatctgttctctccttatctgagctgcccaaggcccctctccagaatggcctctccataccgctgtcctcgtcagagagctccagcacccggctgtctccaccagacgtctctgctctgctcgacatctccctgcccggcccacctgaggatgcgctgtcacagggcgagcctgccacacacattagcgactccatcattgagatcgccatcagctccggtcagtacggtgaaggagtccctctttctccagcaaaactgaatggcagtgacagttccaagagccttccctccccgtccagcagcccccagccacactggatcgcctctcccacccacgacccccagtggtaccccagtgactccaccgactcctcgctcagcagcctgtttgcaagcttcatctccccagagaagagccggaagatgttgccgactcccattgggaccaacagtggcacttccttgcttggccccagcttgttggatggaaactcgcgggactcatttgtgtccaggtccctggctgacgttgcagaggttgtggattcccagctggtgtgcatgatgaacgaaaacagcattgattacatttctcggttcaatgacctggcccaagagctgtccatcgctgagcctggccgccgagaagctctgtttgatggtggtggaggcggccccgctgtcagtgacctgtcccagtgaccacacgtcctggtggcggatgaagccctcttcgagctagagaaaaatagataagcccagcagccccagaagatggtctgaacagaggcatctccgcacccaagactgtgcaacgggcaggaacgtggtcacagagctgcttccccacgagcagcaggcaacggcgtccaaggagactaggatgagttcttggcaagggccagcgttagaaatcactgtggtactagagccgttcttcaccacgcctgggcccatgttagggtctgcataatgatcccatttcagcctgtgctctgcctcgattgttgtgttggacattccggtggcatttccttctgagacaagggagtatgtgtgccttggtgtagttgctgtgcactaggagctgtgatctccctctctgcagggaggccccagcccctgctgcttgctttctgccaaacctgtgctatgcatcagctgtgccctctgtggactgtaacgggcaggacagttgggtgtggcctgggctcatgcctggtggtgtcacatcccaaggcagcaagagcatggataccgatcacagggctgctgcggagtcgtggggccctgggctggtgcctcccctccctagaggttttgttcgtactcttaacagggagtgggggcaggaagagtcctgtactatgcaggttgtgtggactttacatgggaccctgctaagctggttgaaaatgtttttcttgtgttttaagaattaggagacatggaagaggaagaacaaagtcccctctgtagttggtttccttcctgtgtccctttgcaagcttccaggcgatctaaggtgtcatttctccctcctggggtgacccttaggcgctaatatgattacagcgaagactttcctgataagttctcaaactcgatgtgtgactgtttggcacttgagacaaacctgcctttgcagggaaagtgtctctcacgggcattggtgtgggcgtgcctgacatacgtgttcagtcccttgcatacctttgccttgagacttctgtgtctccttcccatttgggacacccaggtgagggcccagacatctggatgtggtcagacctcaccaaatatatgccttcgtggtggtctccctccttgcgccctcttgggtggccagcgttcctactgcagacggcccaacatccagtctttccccaggacagagctaacaagggcccctttgccttctcatcctcaggagttccaggcacatgagtcaccgtccatccacatccagtgtggcctggagctgctacagaggtgttgggcaggccatgcctgtgccgccatctctcccttcctgcctcatttcatcccccgcagcagccgggattgattgtgctttcctaacccccttggacctactctccctcctccccaccattcctcttcccccacatgtgtggcacgctgcagccctcaaggccagccctggcccctccactgcttctctccccatccacaatggagaaggtgaaaagaggagggaaaggcctttggtgtggacaagcatgtggacgccctccgtcctgcagtcttgccagcccaccacagccactgtagaccacaggcaggccgtgtactgcaccactgggaggacgtggagaggacagtgaacttccaggcaagagcttccttcttttgtctcacgagtttttcttagagctcttgcctgagctggcttccctccttcagacattgacatgagatcttaagcaaacagtcccaaacctcttaggggtgaaaaaagaaacatgccacttgattaggagagagacagcagtgtttgaactacagcatctttacactagcttgtgttttgtgctacgtataccagcttccaaaattagcatctcattgagccagagaagacaaggagatctccctctgggcatctggctttgctgcgtctctagagggttaggataccaggccgagttcaggccactgctagctttctcatactcccacaggctagaccagagatgccaagtcccaacagcactgagctgtgtgcactgtgccagggacaggagggtttgtgaactgcctgtcagggtacctgttagcccctgacaactcagtggggtgaagttttggaggtcagagtctgctttcgtaggctctttagacagcacctaccacttggttctccagcgtagactcctgggagcagccaactgcagccattgccatccagtggggagatgggttagggaggaggacgggctgactcctctcctgtaataaagctgacaagagttctagaggattctgcttctctagtaactagacaggtgatacgcatttgcttgccacattaagggaaaatggtgtcatttgttgcagaaaaacaatggatacattttcttctggcctaaatgaatatttatgtgcaaacataggcaactgttaaaggctggaattttcaaaagatccaaacagagacttcctgcatcttctgcctttccaacagaagcggtgatcgtctaagtatgagcctgtggcttcctttgtgcatttgagcatgctgtaattaagatgagatcagtttcttagaaaaagctttcctgaatccctctgacgttgcctgggatctttctgttgattcgtcttttctggagattgggacagagcatctgtggtccagggaagttagtcctctggcctcaattctgttgtggatgtgcagtgataagcgggcattgcgtgcctcgggggatgcctagttcgtggcttcctggctgttttgtccttctgtgtcttgtagctgtagggtgccagctcagggagtggggtgttggcggcgtttccgcggttggcctccttgctttgccgcacctccaggttctgggcatgagaggccgtggcctcatttctggtggataacctttttagtttaatagcatctttaattagatcacagcattgaattcaaaatttcttctgcaaagaaagttgtggggcataagacaccgggaatgagggaggaggaagacagttgtgttttctctttaaaccttgagctctagccgatgcatttgtcaggaaatacagcactttgtcttaagaaaacaaggaaggaggccgggcgcagtggctcacgcctgtaatcccagcactttgggaggccgaggcgggcggatcacctgaggtggggagtatgagaccaccctgactaacatggagagaccctgtctctactaaaagtacagaattagccgggcgtggtggcgcatgcccataatcccagctactgaggagacttgaggtaggagaatcacttgaacctcagcggcggaggttgcagtgagtcgagatcgcgccagtgcactccagcctgggcaagaagagcgaaactgggtctcaagttaaaaaaagaaagcaaggaaagagtaatttacaacgaaggaaaaaaacccacagcacacccttcgcggctgtcagcgctctcctgatgtcacagtggctgcgtgtccttggggtgggtgaggtgtggggagcccagcccctggccctgcctcccgcgccccgctccccttctctctcttactcggttaagccatagcgaggcctccgctcgtttcagatatgaatttgttttatagattataaatatgcatatacagtgtatgtataaagcagaatgcctgcctttcctggttattttttgtaccatattgtaaattatattatttattctttaccaattttgggaataaaaggtgttttggttatttaatataataagagctgttaaacttctgtttaaatttccagttcaacttgtaaatgtttttattgtgcataaatacatactaatgttgatctaa

SEQ ID NO: 132 - DNA, 428 bp, Homo sapiens
ccaactgacaaaagatatatattaaccaaaggtagcatggaaggaaccatacatgatacacaaagtgtgaaaatgagctgaatttatgctctggggctgatattcaaggactgagttctgcttctaaaatgcctttcttaggtagcaagtaacagacaagagtttgagcctcgtggaccactggcagtcaaaaatagtttggcccaagggggaatatatgtgctcttggagtggaaaggcagagaccagtgagcctacagcaccatgcgctgctgagaaagaaggggcctcggtggcatagaacagccacgtgggatatggctactcctgcataccagagtctgccaagaacaagcccttctgctgtggacatttatgtttcttttgaacatcactgatacttaactgtttacttttgaggactccgc

SEQ ID NO: 133 - DNA, 441 bp, Homo sapiens
  misc_feature (392)..(392): n is a, c, g or t.
gtagagacaggctctcactatgttgtccaggctggttttaaactcctggcctcaagccatcctcctgcctcagcctctcaaagtgctgggattacagacatgagccactgtgcccggcctcaacacatttctaatgatatggccacactaagtcactgaggcacaaaacctggacttaaagttctccctctcaccactcccacgtgtattcagaccctgccagggcgcagagtactcctgtgtggcgcctcttgctgcatccttccaccacctttcggttctgaggcctctgcttgagttcaggccctttcaactctcaccaggagacaggcccaacagccacctcctcaaccctccccattgccacggctctgtcatcaagacaccagctntcaaagctctgtattatatctctattatctagtgaattcagaacaaact

SEQ ID NO: 134 - DNA, 468 bp, Homo sapiens
ttttatagaattgattttaatacatcattatcagtatgtggccaacagggaaatttgctagatctcagatgcactttgtctccattgggtggcctttccttggtgtttttgaatagtagagataatctagttttaaagctggtacttttgtgaatgtgtactttcatactccatgtctcaggtacccctagaggactcacttagaatattaagtgaataatatagaataaccccaggagtattcacttctcttcttctcaggctgccttggtgcagacaaatatattgtccccaacttcctgccttgtgccccaagaagtcttactaaaatggtacatatggaaacagcagaatgtgactctgttctctgtgtctggaaatgaatggatcaacccccagttagggatgctgtagagatgtttcctgggcatcttcatgtccatttctcagtttctgagctggttctgg

SEQ ID NO: 135 - DNA, 343 bp, Homo sapiens
ttttttttttttttttttggggtttaaaacaacatgaatttattattttatagttctggaggttggaagtcctacagtcaaggtgtcagcagggttttgttcctgctggagtctctaggggaggatccattttcttgccttttccagcttttagagaccacccacattccttggcccatggccctttccttccatcttcacatctgtctctcaccactgcgtccatcatcacagctcatctgtgactttgacactccagtctccctattataaggacccttgtgattatactgggcccattcatgtaattcagagtcacctccccagctcaaaatccttaatc

SEQ ID NO: 136 - DNA, 413 bp, Homo sapiens
attttcatacaactcatttataatttattttcacacaactcactatgttacaaaactgtacacctgcccccaaagttggataacccaaagtcacattccttggaaagagaagaatcaacactgggccgctttttcaagagcagtctcttctggattgggcccaacaaggctagaccagaatgtggagtacaggaatggccattcttcaagtccgaggggtcaggttcttagcctggtgcttccagtcgttacaggaggggtgtctctgtttggaaagccagcaccagcacccagaacacaggagtccagagagacaggcaggcactgctggccaccatctggctgtggtgggaatgcccacggcgagggagccgcagttcagtggagatgtgcctgtccaggacagggacctg

SEQ ID NO: 137 - DNA, 489 bp, Homo sapiens
aattttgctttttgtttatttattttcttttcttgatatagtggatatatatatctacttcataaggttttagggagaattatgtagcattcaatgagacagtcatcaccgtagtaaaaggaacagttggagggtagtagcaataataatactagtagaagatactgtgtttgaaactcttaccaaagtcacaactaaaaatgatcatagctggaattccaactcattttctgactttaaagcccatgttgaaaatactgtgtaaaatgcacgaagcacctggcaggcagtcatctgtgattactggtttctttattgcttgagttggatgacagtcctaggtcatctgattggattttggattcatttgagacatctggaacctctcttgggaacttcttcctccttgggcctttgcagcaggacagatgggctctcaacaccactgcagatttcaggctctctctcactggaacattaagaagtagt

SEQ ID NO: 138 - DNA, 3869 bp, Homo sapiens
ggagatcagacattgctgtctggtgctcctctctcagtggccatcatgtctttgacatctgcttaccagcataaattagcagagaagctcactatcctgaatgatcgcggtcagggggttctcatccgtatgtataacatcaagaagacttgttcagaccccaaatctaagccacctttcttactggaaaagtccatggaaccatctctcaagtatatcaacaagaaatttcccaacatagatgtccgaaacagcacgcaacatttaggaccagtacatcgtgaaaaagccgagataattagattcctcaccaactactaccagtcatttgtggatgtcatggaatttcgggatcatgtatatgaacttctcaacaccattgatgcctgccagtgccattttgatatcaatctcaactttgatttcactcggagttacctggacttgattgtaacttacacctcagtcattttacttctgtcacggattgaagatcggcggatactcattggcatgtacaattgtgcccatgagatgctgcatgggcatggtgaccccagttttgcccgtctgggtcagatggtcttggagtatgaccaccctctgaagaagctgacagaagagtttgggcctcacacaaaggctgtgagtggagccctcctctctttgcatttcctctttgtccgaagaaaccagggggctgagcagtggcgcagtgcccaacttctaagcctcatcagcaaccccccagccatgattaaccctgctaattcagatacaatggcctgtgagtatctgtctgtggaagtaatggagcgctggattatcattgggtttcttctttgtcatgggtgcctcaactccaatagccagtgccagaagctgtggaagctgtgtctgcagggctccctctacatcacccttatccgtgaggatgtgctgcaggtgcacaaagtcaccgaggacctgtttagcagtttgaaagggtatggcaagagagtggcagacataaaggagagcaaggaacatgtaattgcaaacagtggccagtttcattgtcaacggcggcaatttctgcggatggcagtgaaggagctggagactgtgttggctgatgaaccgggactactgggtcctaaggctctttttgctttcatggccctgtccttcattcgtgatgaggtcacctggctggttcgccacacagagaatgtcaccaagacaaagacacctgaggactatgctgactcgagcattgcagagctacttttcttgttggaggggattaggtctctggtccgaagacacatcaaagtgatacagcaataccaccttcagtacttggcaagatttgatgctcttgtgctcagtgacatcattcagaacttgtctgtgtgtccagaggaggagtccatcatcatgtcctcattcgtcagtatcctctcctctctgaatctcaaacaagttgataatggagaaaaatttgaattctcaggattgaggctggactggttccgcctacaggcatacactagcgtggctaaggcccctctgcacctgcatgagaaccctgacttagccaaggtgatgaacctcattgtcttccactcccgaatgctggactccgtagaaaaattgctggtggaaacttctgatctgtctactttctgctttcatcttcgtatctttgagaagatgtttgccatgaccttggaggaatctgccatgttgcgttatgccattgctttccccctgatttgtgctcactttgtccactgcactcatgagatgtgcccagaggagtacccccacctcaagaaccatggtcttcaccactgcaactccttcctggaagagttggccaagcagaccagcaattgcgtcctggagatctgtgctgagcagcgaaacctgagcgagcagcttctacctaagcactgtgccactacaatcagcaaagccaagaacaagaaaaccaggaagcagaggcagactcccagaaaaggagagcccgagagggacaagccaggagctgagagtcaccggaagaaccgcagcattgtcaccaacatggacaagctacacctaaacttgacagaactggcactgacaatgaatcatgtatacagtttctccgtgtttgaacatactatcttcccttctgagtacctcagcagccacctggaggccagactcaacagagccattgtgtggctggctggctacaatgccacgacccaggagatcgtacggccttctgagctgttggcaggagtcaaagcatacattggtttcatacagtcactggcccagtttttgggtgcagatgcttccagagtcatccgcaacgccctcctgcagcagacacaaccactggattcctgtggggaacagacaatcaccacactctacacaaactggtacctggaaagtctgcttagacaggcaagcagtgggaccatcatcctctccccagccatgcaggccttcgtcagcctgcccagagaaggggagcagaacttcagtgcagaggagttctctgacatctctgagatgcgggccttggcagaactcctgggcccctatggcatgaagttcctgagtgaaaacctgatgtggcatgtgacctctcagattgtggagctgaagaagctggtggtggaaaacatggacatacttgttcagatcagatccaactttagcaagccggacttgatggcttccctgctgccccagctgacaggggctgaaaatgtgctaaagcgcatgaccatcattggggttatcctcagtttcagggccatggcccaagagggacttcgggaggttttctcctcccactgcccatttcttatgggtcccattgagtgcttgaaggagtttgtcactccagacacagacatcaaggtgaccttgagtatctttgagctggcatctgctgcaggtgtgggctgtgacattgacccagccttggtggctgccattgctaatctgaaagctgatacttcatctcctgaggaggaatataaggtggcctgcctgctcttgatctttctggcagtttccctcccactccttgccactgacccttcttccttttatagcattgagaaggatggttacaacaacaatattcattgcttgaccaaagccatcatccaggtgtctgctgccctcttcacgctctacaacaagaacattgaaactcacctcaaggaatttctggtggtggcctctgtcagcctcttgcagctgggccaggagactgacaagcttaaaaccagaaatcgagaatccatttctctgctcatgcgcttggtggtggaggagtcatccttcctgaccctggacatgctggagtcctgtttcccttatgtcctgcttcgaaatgcctatcgggaggtgtctcgggccttccacctaaactgaatgcctgccagtacccactgaagagccctttggaccttcctaaacccttgccatagtggaagctgtggtcactttcgcagggggtgggaatggggtggggtcactaaggagagagggtcaggagccagagttgatgagcagatctgtggaagaacaatccagggctgagaaatcgtagagcagtgaggcaggctgggagcatggaggacagcttatggaaaaagttagggcgtggggccacatgtgtgaattttacaatgaaaaaaggagtaacgtacaagtatattttctatcttctggtgacttgagcttgagctctgacaggcatgggcctctccgaccttcatcactattcttaggataatgctggcgggcagagatgatcaatcatcatattaaatcataatgagcttataatcctcccactggaaaaaaaaaaa

SEQ ID NO: 139 - DNA, 2609 bp, Homo sapiens
ggctctctacctctcgccgcccctagggaggacaccatgggcccactgatggttcttttttgcctgctgttcctgtacccaggtctggcagactcggctccctcctgccctcagaacgtgaatatctcgggtggcaccttcaccctcagccatggctgggctcctgggagccttctcacctactcctgcccccagggcctgtacccatccccagcatcacggctgtgcaagagcagcggacagtggcagaccccaggagccacccggtctctgtctaaggcggtctgcaaacctgtgcgctgtccagcccctgtctcctttgagaatggcatttataccccacggctggggtcctatcccgtgggtggcaatgtgagcttcgagtgtgaggatggcttcatattgcggggctcgcctgtgcgtcagtgtcgccccaacggcatgtgggatggagaaacagctgtgtgtgataatggggctggccactgccccaacccaggcatttcactgggcgcagtgcggacaggcttccgctttggtcatggggacaaggtccgctatcgctgctcctcgaatcttgtgctcacggggtcttcggagcgggagtgccagggcaacggggtctggagtggaacggagcccatctgccgccaaccctactcttatgacttccctgaggacgtggcccctgccctgggcacttccttctcccacatgcttggggccaccaatcccacccagaagacaaaggaaagcctgggccgtaaaatccaaatccagcgctctggtcatctgaacctctacctgctcctggactgttcgcagagtgtgtcggaaaatgactttctcatcttcaaggagagcgcctccctcatggtggacaggatcttcagctttgagatcaatgtgagcgttgccattatcacctttgcctcagagcccaaagtcctcatgtctgtcctgaacgacaactcccgggatatgactgaggtgatcagcagcctggaaaatgccaactataaagatcatgaaaatggaactgggactaacacctatgcagccttaaacagtgtctatctcatgatgaacaaccaaatgcgactcctcggcatggaaacgatggcctggcaggaaatccgacatgccatcatccttctgacagatggaaagtccaatatgggtggctctcccaagacagctgttgaccatatcagagagatcctgaacatcaaccagaagaggaatgactatctggacatctatgccatcggggtgggcaagctggatgtggactggagagaactgaatgagctagggtccaagaaggatggtgagaggcatgccttcattctgcaggacacaaaggctctgcaccaggtctttgaacatatgctggatgtctccaagctcacagacaccatctgcggggtggggaacatgtcagcaaacgcctctgaccaggagaggacaccctggcatgtcactattaagcccaagagccaagagacctgccggggggccctcatctccgaccaatgggtcctgacagcagctcattgcttccgcgatggcaacgaccactccctgtggagggtcaatgtgggagaccccaaatcccagtggggcaaagaattccttattgagaaggcggtgatctccccagggtttgatgtctttgccaaaaagaaccagggaatcctggagttctatggtgatgacatagctctgctgaagctggcccagaaagtaaagatgtccacccatgccaggcccatctgccttccctgcacgatggaggccaatctggctctgcggagacctcaaggcagcacctgtagggaccatgagaatgaactgctgaacaaacagagtgttcctgctcattttgtcgccttgaatgggagcaaactgaacattaaccttaagatgggagtggagtggacaagctgtgccgaggttgtctcccaagaaaaaaccatgttccccaacttgacagatgtcagggaggtggtgacagaccagttcctatgcagtgggacccaggaggatgagagtccctgcaagggagaatctgggggagcagttttccttgagcggagattcaggttttttcaggtgggtctggtgagctggggtctttacaacccctgccttggctctgctgacaaaaactcccgcaaaagggcccctcgtagcaaggtcccgccgccacgagactttcacatcaatctcttccgcatgcagccctggctgaggcagcacctgggggatgtcctgaattttttacccctctagccatggccactgagccctctgctgccctgccagaatctgccgcccctccatcttctacctctgaatggccacccttagaccctgtgatccatcctctctcctagctgagtaaatccgggtctctaggatgccagaggcagcgcacacaagctgggaaatcctcagggctcctaccagcaggactgcctcgctgccccacctcccgctccttggcctgtccccagattccttccctggttgacttgactcatgcttgtttcactttcacatggaatttcccagttatgaaattaataaaaatcaatggtttccac

SEQ ID NO: 140 - DNA, 4083 bp, Homo sapiens
tcttcccatccacccgccgcttctttcctccatctagcgatttttattttttaagtgtctcttcctttttctttcttttcttttttattttttatatatattttttggcattgctttgcagatgttgggatgagagtcggagccgaataccaagctcggatccctgaatttgatccaggtgctacaaagtacacagataaagacaatggagggatgcttgtatggtctccatatcacagtatcccagatgccaaattggatgaatacattgcaattgcaaaggaaaagcatggctacaatgtggaacaggcacttggcatgttgttctggcataaacataacattgagaagtcccttgctgatctccctaatttcactccctttccggatgagtggacagtggaagataaagtcctatttgaacaagcctttagttttcatggaaagagctttcacaggattcagcaaatgcttccagataagacaattgcaagccttgtaaaatattactattcttggaaaaaaactcgctctaggacaagtttgatggatcgccaggctcgtaaactagctaatagacataatcagggtgacagtgatgatgatgtagaagaaacacatccaatggatgggaatgatagtgattatgatcccaaaaaagaagccaaaaaagagggtaatactgaacaacctgtccaaactagcaagattggacttggaagaagagagtatcagagtttacaacatcgccatcattctcagcgttctaagtgccgtccacctaagggcatgtatttaacccaggaagatgtggtagcagtttcctgtagtcccaatgcagccaacaccatcctgaggcaactggacatggagttgatctctctaaaacgtcaggttcagaatgctaagcaagtaaacagtgcacttaaacagaaaatggaaggtggaattgaagaattcaaacctcctgagtcaaatcagaaaattaatgcccgttggaccacagaggagcagcttctagcagtgcaaggtgtccgcaaatatggtaaagattttcaagctattgcagatgtaattggcaacaagactgttggccaagtgaagaacttctttgtaaactacaggcgtcggtttaacttagaggaggtattgcaggagtgggaagcagaacaaggaacccaggcttctaatggtgatgcttctactttaggggaggagacaaaaagtgcttctaatgtgccatcagggaagagcactgatgaagaagaggaggcacagaccccacaggctcctcggacactgggtccatcacctcctgccccatcatccactccaacaccaacagcccctattgccactctgaaccagcctccaccacttcttcgtccaacactgcctgctgccccggctcttcaccggcagcctcctccactccagcagcaggctcggttcatccagccccggccaactttaaatcagcctccaccacctcttattcgccctgctaattccatgccaccccgtctaaacccaagaccggtgttgtccacggttggtggtcaacagccaccatcacttattggaattcagacagattcacagtcctcactgcactaaaaattaaattggacacagctgcagtaacttttcaccccatcattataccagtgctcatctgactgatgaaaaagaggaaagaataatcatttctagatactgaggctgcgaactagttctgtggcagtggactagcataagtggatgtctaagaaatttttcagttcactagactaaaatgttttacaacaaaaagcctccagttagcctcctttctagagtatatgttcagcaatgtgatctcataaaaggaaaaacaaaagatttaagtattctatataccaagtttttgttttgtttttactgtatttattttattgaggttctttatattcctgcctcttcatagtcaaggctcttagtacaggaatattgacttaggaattgtgaaaactccttaagtttcttaagttaaggatgtttggcttttttctttaattttttaaaaaccattttcctatgttaggagtgcaagaatagccagcatttccgattttgacatatgttcattttatgcatatttaagaaattatagctgcatatcccttctttcaaaaaatgttgcttttttttttaaaggaattttaatatattcctttaaaagaaagcaatttaatcaattgcaaagcaattatataaaaccacaaagaatgtactgaacctactaaccctttaacatacagtttagggtcctagcgcagagtccttgtttaaaggtcattgactcatcatctgtcagtaatgagaggattggaagaataattttgcatacaaatgaggacttaatttgttgaaatataatctctttaagttccttgaaaatggagttggttttttttgtttctaaatgctatctgcttttaactagtagttgcctacatctggggacttcagagaagaattatattttgttagttaagtagacacagtggttatggaagcatttctttacagtaccctttacgtgtttggtttctgaacttaaaattgccctcatacttaataatatggtctgcatttaatatgaaaggtgttttattgataaatctattgtactatttggatacatttgtgtattccttgcagccaacctgtattcgtgggattggtgtagggttaaatcatcaacattatttcataaaataagaatttgttctgtgttatctaaagatgtatcagtatattgtcacagttgtgctgttaactaaaaatgctgagacccctttttatagaaaaacaaaaagacatcaagtcttcttaattcaacccataatcattaagtacttaacaaagaatattttacaagtgatagtatttcaacaatgtgtaattaatatttttgatacagtgatttcatattggaatcattatttgtgcaaagggacagacagatcacttagattgctatactagtggacataggctaaatgtttgcacattcacattcttatcacgtgtagaatacttcacaaaatagtcaacatctaaggccctaatttatgttttgaaagatcatgtgttcccaaagtattccctattgttggctccacagccttaaagtgctatagatttaaattcattgattagttttaatttttaattttagactgtgtatttccataaataccctacgtactggcatatttgaaactctttttccaggttaggtccttttctttctcattgaatcatcttaaatagttcttggccctgaatttagctgatttaaaattcttaatattcaagaatttatacttattttttccttaaaagccacaggggacagttaaatatcttaaaatatctaaaacattttttaaagcacttagattgtcttacgtatgtgcatactatacctttacagcgtttattgtcttgtctcttgtcagtagaccttcagtacacagtatgtgggatatgtcagtcaagttggtcagcaccagcatctgtccagctgttcagtatattgtgattcattaaaaaatctcttctatcccagacatgggccaaggtgctgtatctgagggatgtgctgtaatttgatttacatgcattagagcacacagtagaaaaacgttagcttcattagtaatatgacacatgtatatagtgagatgtctttattgtgtgctttgcatattttgtaaatattttgcacgtcattatttttcttttttgtttaagcagtgtttggcctggaagagtgatatgcttgctgcttaatcaaaggattaaagatttaaagatgtctatgtcttctatttttatataatttcatgttctatgaggaatttagtacctcttcactgtgaaattcgaaataatgatttttataaaagcaaaactagaaatcttttaatgacaattttcattaatttcagggttatcatttttgagaaatctacaccaaagtggttttttaaaattacataactaaaaataaaccacactgtggatacatcttat

SEQ ID NO: 141 - DNA, 396 bp, Homo sapiens
  misc_feature (360)..(360): n is a, c, g or t.
ttttttttgaatgagtataaaactgttcaaataaaattttatttgcaaaaccaggcagcaggctagagttggccatagtttgcagacccctgtcttaggctgtaaattctgttgcatgtgacagagacccaaaataatggtggcttaaataagatagaagtttctttcttagatagcaatatggaagtgggctggtatggtggctgtgctccttgaaattgacgagagacccagggctcctatcttgttgctctgtcttcccacgtgttgctcttatccttatgggtctgaggatgggctgggataccatttccgtattacagttagggaaggtgggaaaaaaggtatgttccctttctnttctttttttttaaacagtctcactctgtcacccgg

SEQ ID NO: 142 - DNA, 409 bp, Homo sapiens
  misc_feature (18)..(18): n is a, c, g or t.
  misc_feature (281)..(281): n is a, c, g or t.
  misc_feature (373)..(373): n is a, c, g or t.
  misc_feature (378)..(378): n is a, c, g or t.
tttttttttaagcaggangattctttttatcaaatgaaatcttaagcagaatcccagcatataaaacagaatggaattactttgatctgattgaagttggggctggtttcagagatcataggccatcttcttggcctgtcatggaggcctgtgaggcatctctacagaccctggtactctgtgaagagtttggaaattactgatctactttaacccccaaatctctaagctgaaaagtacaaaggggcccagagagttagataaatttcccaggctgtgtngtaacccacgtctccagtgtcccgggccagcaggcttttccctcaattgccttcctttttcagcaaaataagactaggagcttggccaggtncagtngcttatcctgtaatcctaggcactttaggga

SEQ ID NO: 143 - DNA, 476 bp, Homo sapiens
  misc_feature (391)..(391): n is a, c, g or t.
  misc_feature (456)..(456): n is a, c, g or t.
  misc_feature (468)..(468): n is a, c, g or t.
ttttttttttaactgattcacagcttcaatgccatttatggacatttaaaatgcacacatatgcagaacaatgctttagcttttcgagcatatgtatcaaaacattaaaattggatgggtgcccctgggaaaaaggaaagtaggcaggggactgggaatgaagggaaagaaataaaactaaaagacaaaaggtttgcatagaccaatattgatgaagtgccacacactgaggagtgtgctgagctgcgtgaggtgcagagggaacctggaaaggagagagcaggagtatagaaaagtacagctcttgggaggctgaaggtcagatagtcaggtagcctggggtcaaatctgagctctgctgcttcccagctctttcaccttggacacgttnttccaagctccctcgcgtttctttttacgttcaaacaaggttacaaggtgttttacacaagcagntagcagatttgntcccgact

SEQ ID NO: 144 - DNA, 326 bp, Homo sapiens
  misc_feature (5)..(6): n is a, c, g or t.
  misc_feature (8)..(8): n is a, c, g or t.
  misc_feature (302)..(302): n is a, c, g or t.
  misc_feature (318)..(318): n is a, c, g or t.
atttnntngctactagaaaaccttaaattacaaatgtggcttatcttgtatttctgctggacagagctgctagaacctcccagcaattaaagagtgtcatgcataaaaatcatatatacacacaaagctaagacttactaactatagtgaatatcccgttaccttaagagtctcaaattatatgcatattttaaaagatatcgtctttttaaagttaaattttttaagtttcacctaggactgactttttttaacaaaataacctaggaggtgatccctatggatataggtttaagggggtngtaggttttggggggnctcaacca

SEQ ID NO: 145 - DNA, 6059 bp, Homo sapiens
cgccgggcgggcgggcactgcagcttcttcctccgtggagcggagagcgagacagagctacagcgaacgagagagcggcgaaggcgggtagaggggcgcgggcgaggcggcgcagccatccccggaccaggggccgcgccgccaccatgctaaacaacctgacggactgcgaggacggcgatgggggagccaacccgggtgatggcaaccccaaggaaagcagtcccttcatcaacagcaccgacacagagaagggaaaggagtatgatggcaagaacatggccttgtttgaggaggagatggacaccagccctatggtgtcctccttgctcagtggcctggccaactacaccaacctgccccagggaagtagggagcatgaagaggcagaaaacaatgagggtggaaaaaagaagccggtgcaggccccacgcatgggcaccttcatgggcgtgtacctgccgtgcctgcagaacatctttggcgtcatcctcttcctgcggctcacctgggtggtgggcattgcaggcatcatggagtccttctgcatggtgttcatctgctgctcctgtacgatgctcacggccatctccatgagtgcaattgcaacgaatggtgttgtgcctgctggtggctcctactacatgatttccaggtctctgggcccagagtttgggggtgccgtgggcctctgcttctacctgggcactacctttgcaggagccatgtacatcctgggcaccatcgaaatcctgctggcttacctcttcccagccatggccatcttcaaggcagaagatgccagtggggaggcagcagccatgctgaacaacatgcgtgtttacggcacctgtgtgctcacctgcatggccactgtggtgtttgtgggtgtcaagtatgtcaacaagtttgcccttgtcttcctgggttgtgtcatcctctccatcctggccatctatgctggggtcatcaagtctgccttcgacccacccaacttcccgatctgcctcctgggtaaccgcacgctgtctcgccatggctttgatgtctgtgccaagctggcttgggaaggaaatgagacggtgaccacacggctatggggccttttctgctcctctcgcttcctcaacgccacctgtgatgaatacttcacccgaaacaatgtcacagagatccagggcatccctggtgctgccagtggcctcatcaaagagaacctctggagctcctacctgaccaagggcgtgattgtggagaggagtgggatgacctcggtgggcctggccgatggcactcctatcgacatggaccacccttatgtcttcagtgatatgacctcctacttcaccctgctggttggcatctacttcccctcagtcacagggatcatggctggttctaaccgctctggggacctgagggatgcccagaagtcaatccccactggcaccatcctggccatcgccaccacctctgctgtctacatcagctccgttgttctgtttggggcctgcattgagggggtcgtcctgcgggacaagtttggcgaagctgtgaatggcaacctcgtggtgggcactctggcctggccatctccatgggtaattgtcatcggatccttcttctccacctgtggggctgggctgcagagcctcacgggggccccacgcctgctgcaggccatctcgagggatggcattgtgcccttcctgcaggtctttggccatggcaaggccaatggagagccgacctgggccctgctcctgactgcctgcatctgcgagattggcatcctcattgcatccctcgacgaggtggcccccatcctctctatgttcttcctgatgtgctacatgtttgtgaatctggcctgtgcagtgcagacgctgctgaggacacccaactggaggccacgctttcgatattaccactggaccctctccttcctgggcatgagcctctgcctggccctcatgttcatctgctcctggtattatgcactggtagccatgctcattgctggactcatctacaagtacattgagtaccgtggggcagagaaggagtggggcgatgggatacgaggtctgtctctcagtgcggctcgctatgccctcttacgcctggaggaagggcccccacacaccaagaactggaggccacagctgctggtgctggtgcgtgtggaccaagaccagaatgtggtgcacccccagctgctctcactgacctcccagctgaaggcagggaagggcctgaccatcgtgggctctgtccttgagggcacctttctggaaaatcatccacaggcccagcgggcagaagagtctatcaggcgcctgatggaggcagagaaggtgaagggcttctgccaggtggtgatctcctccaacttgcgtgatggcgtgtcccatctgatccagtccgggggcctcggggggctgcagcacaacactgtgcttgttggctggccccgcaactggcgccagaaggaagatcatcagacgtggaggaacttcattgagctggtccgggaaaccacagctggccacttagccctgctggtcaccaagaacgtttccatgtttcctgggaaccctgagcgcttctctgagggcagcatcgacgtttggtggattgtgcacgatggaggcatgctcatgctgctgcccttcctgctgcggcaccacaaggtctggcggaagtgcaagatgcgtatcttcactgtggcccagatggatgacaatagcatccagatgaagaaggatctgaccacatttctgtatcatttacgcatcactgcggaggtcgaggtggtggagatgcatgagagcgacatctcagcttacacctatgagaagacgttggtgatggagcagcgttcccagatcctcaaacagatgcatttaaccaagaatgagcgggagcgggagatccagagtatcacagatgagtcacgaggctcaatccggagaaagaatccagccaacacgcggctccgcctgaacgtcccagaagagacggctggtgacagtgaagagaagccagaggaggaggtgcagctgatccacgatcagagtgctcccagctgccccagcagctccccgtccccaggggaggagcctgagggggaaggggagacagatccggagaaggtgcatctcacctggaccaaggacaagtcggtggcagagaagaataagggccccagtcctgtctcctctgagggcatcaaggacttcttcagcatgaagccggagtgggagaacttgaaccagtccaacgtgcggcgcatgcacacggccgtgcggctgaacgaggtcatcgtgaagaaatcccgggacgccaagcttgttttgctcaacatgcctgggcctccccgcaaccgcaatggtgatgaaaactacatggagtttctcgaggtcctcacagagcacctggaccgggtgatgctggtccgcggcggcggccgcgaggtcatcaccatctactcctgagaaccaggtcctgccacccgggcccgagcgcgcccggcccgcggctccggagccctcgccgcgccccccgccgctgtcaccgtttacatacagaccctgtgcccgtgtcctggccccttaccccgctgcctgaagcccggaggccacgcctgttggggctgattcggagagggcgccccgccgcgcagagaccagagctcctcagtgccagtttggcccctgggtcttcgctgccctttttctaagcccggcctcgtctcgccggaggagacgctgcaataaaggttgggagaaggcgcggaaaggagaggagctggggccttggggacccccaggtagtccatgcggcccattcctccccttcccactcccgccgcggtcctcgctctgcgctcctccggcgctgctccctggctcccggcggcccggaggcccgcggggtgggaaggccgcgcttgccgtctccgccgccccttctcgccgagccgtggggcgcgggcggccgagcctatacatagtgtacaggagacatcgcgtgtatttttaacgtccccatatttatgtgactagaagcgcaacagacttctcgccatagtcgagctctcccgctgggggcactgcggggaggcgaggcctcgggaagctgaattttccttgacgtccaagagtttgagagcgaaagtgctttaggcccaggcgggggtcgtggcctcgttccctcgacacctccgtcctgctctcgcctcttcgccctttccgcgcgcccttggcttcccaccctcctctccagtccttttccgagatgaggtgagacaagggtccaacttttcctggattcgcctcccagcggacgtgagcttccactgcggctgcagagacgcgagcaacctcttctcatcggctcttatgcaagttggggccaggataggggaggggtgctcctcaagaggaagaaaccgagaggcccgcgccccaccgaggaagccccgccccggtgccttcgctggggagcaggcgtctctcctcagtcggcttgtcgcctgctccccgtatcccatggctcctcgccaaagactgaaattgtggagctggagggcgccccctccccggagtttcctccctgggacaagtgagggaggagggggccgattctggtttaggggccggacccactgagaggccccagagccgcccgtgatgttcctcccccgtccccatctggcagctcctgtctcgcctgagggacccagccgccttctccgtgctctggggccgggcctcgctgcttagcagcggcctctagctccgtctcccggggacctgggcctgagggagggctggagtcgcacgcgctttgtccttagcgcctgtctgctctcctctaactaggacccagggcctttggcttccccagctcatccttggcccttccgctccaccagcctggtctgaggcgtgctctgtccttagagaaggcgcggtggccgggttcccttcccctagggcacattactaagggggtcaggcactgcatgctcgttccagcaccatctgggactgggtacagtacctccagccccagggccctgacctgcgcacctagcttgacatctcacgcacctcccagagctggcgccactgagtaatccggacctcaccacctcttttcctttgagcccaaggcagagctggagctggcgccacccagacagcgtcaggtgtggctggggtaggtttggaggtctgccagttacgccaagtcccctctgagattcgatcaggggactggatagattctttcaggtactcaatcaggaagctggaggtgttagacaccagccccctgcatccttcagtagacctccctctgaacaccacagccaggtcctgccttctgggggcctgaatattccagagctgatgtgatgggctgtgcagaagggggctgtatcaacatcaattagggaaccaaagttgcactatctgggcccagattgtctggttggcaagagcaaagtttccgttgatgaaacagacatcccacaacaaaaacccaagttttctgtgctacatgtgcaatatttgttatgaatgttatcacaagtcattcatcaagttatctttataatcactgtagttagatgtttcatgtccattcaagtgacttttattctgagtgcaatatttcaatagccttgtagtgataactagtgttgcttttgttttagatgatctatgtgcagggcaatgcaatgaagttgaaaacccttgtaaataggagaggttgcaaaccaaatcaagagtatttattactattactgctattattattaggcctgcctttaattttcagtgtaagtgttcagtatgccgcatcctgcctcagtattgatcttgtgttctttgtgccaatatgaaaaggagagggttggttctttcctttattgttgaatgctcccatttaatgctttatggcttttactgtattacttttttagactcccgtctgcacaaaatgcaataaaaataattttattatacccttaaaaaaaaaaaaaaaaa

SEQ ID NO: 146 - DNA, 445 bp, Homo sapiens
  misc_feature (363)..(363): n is a, c, g or t.
  misc_feature (391)..(391): n is a, c, g or t.
  misc_feature (429)..(429): n is a, c, g or t.
  misc_feature (436)..(436): n is a, c, g or t.
ctgctagcaaatttactgcttttggccagaaaagaaatgctgaggacatggggttaactttctaatttgagaagactattttggtgaatcaccttcagtgaacaaatgcctgttatttactgaccaccttgagtctttaaaattgaattattcttgtcgtttacaaaaagtaacactttaaaagatcacagaatctctcacatacacacacacacacacacacacacacacacacatggcacacacacactcaaaaggtaccaaatcgggcccggcaggctggcggagaggttacattcataactcggctgtgccggggggtttaccccacttccacatggggcggcatttcagggttagggnaaatccatggggcgggcacatttgggtncggcggtttctttttttttggggttttttcggggggtntttgganacaaacggt

SEQ ID NO: 147 - DNA, 3962 bp, Homo sapiens
atgtcgctgcagcgggagcccccgcggcccgagccgccgccgccgttcccgccgctgcccttgcagccgcccccgccgcgggagtcggcttcccgggctgagcagccgccgcggccgccgagggagacggtgcgcctggagctggtgcttaaggaccccaccgacgagagctgcgtggagttcagttacccggagctgctgctgtgcggagaacaacgggtacagaagattcttccctcctgccccagaccccgggagcctcaggacccgccgccttccccagctggtttgcaccttgggacgcccaccgagagcgtccgggtcgccccgagggtgggggtgcggggggccggggccgagcgggtggacggggcggtgagcgctgctttctccactccccagggtggccgaggctctcacccggctgcgccgaatccccaaacccctggcactcgctcccaacgccgcgccgagcctgttttcttgtgcacctttcggaacctcagattttccttctttcctttctgctccccacacaaaatcctggggccctgcaggccgtgtggctgggttctccctgtggcgctacagctgtcgttccagctgtcaagagaaaataagagctgtacttttgatacctacataaagtacataaaatattttagaatggcgtataagaagaagctcattcgcacagaagacccatttaatgatgaacatcaggagaggcaagaggtggaaatgttggctaagaagtttgaaatgaaatatggtgggaaaccccgtaaacaccggaaggatcggctacaagatttaattgatataggctttggctatgatgagacagatccatttattgataactcagaggcttatgatgaattagttcccgcttctctaacaacaaaatatggaggcttttatatcaacactggcactctacagtttcgccaagcttcagatactgaagaagatgatattacagacaaccaaaagcacaagccacccaaggtcctgaaaataaaagaagatgatattgagatgaagaagcggaagcggaaagaggaaggggaaaaggagaagaagccaaggaaaaaagttcccaaacaactgggagttgtggctctaaattcacacaagtctgaaaaaaagaagaaacgttataaagattctctttctctagctgccatgattagaaaattccagaaagagaaggatgcattaaaggagtctaaccccaaagtcccagtgaccttgtcaaccccttctctgaataaacccccatgtgctgctgcagcactggggaatgacgtcccggacttaaatctcagcagcgctgatccagaccttcccatttttgttagcacaaatgaacatgagctgtttcaggaagctgaaaatgccctagagatgctagatgattttgacttcgacagattactggatgctgcttctgatggtagccccctatctgagtcggggggtgaaaatggaaccaccacccagccaacctacacttctcaggttatgcccaaagtggtacctacactcccagagggtctacctgtacttcttgaaaaacgtatcgaagaccttcgtgtagctgccaaactttttgatgaagaaggaaggaaaaaattctttacacaggatatgaataatattcttctggacattgagttacagctacaagaactaggccctgtcattcgcagtggtgtctactcccaccttgaagcttttgtgccatgcaataaagaaacactagtaaaacgtctgaagaagttacatctcaatgtccaggatgatcgtttaagagaacctctgcaaaaactgaaactggctgttagcaatgtcatgcctgaacagctatttaaataccaggaggactgccaggctcgtagtcaagctaagtgtgccaaattgcagacagatgaagaaagagaaaaaaatggatctgaagaggatgatgatgagaaaccaggaaaacgtgtcataggaccaagaaagaaattccactgggatgacactatcagaactttgttatgtaaccttgttgagatcaaattgggatgctatgagttagaaccaaataaaagccagtctgctgaagattatcttaagtcttttatggagacagaagtgaagcccctgtggcctaagggctggatgcaggcaagggcaaagaaaaaggtgattcctgcacctaaacccaaagtaaaggagtgtagtccaaaaaaggaccagaaaactccaacatccctggtggcttcggttagcggtcctccaacgagctccagcacagctgccattgctgcagctagctctagctctgcaccagcccaagaaaccatctgcctcgacgactcactagatgaagacctttctttccattcaccttcactggatcttgtttctgaagctttagcggttatcaacaatgggaacaagggccctccagttggctcaaggataagcatgccaaccacaaagcctcgtccaggactgagagaagaaaaattagcaagtatcatgagtaagctgccactagctactcccaaaaaactagattctactcagactacacattcttcaagtcttattgctggtcacacagggccagtaccaaagaaaccccaggatttagctcatactggcatctcttcaggccttattgctggttcttccattcagaaccctaaagtttctttagaacctttgccagccaggctacttcaacaaggacttcagaggtcaagccagattcacacttcttcctcttcacagacccatgtctcctcttcttcccaagcccaaattgctgcctcttctcatgctctgggaacatccgaggcccaagatgcttcttcgttaacacaagtaacaaaggtgcaccagcattcagctgtccagcagaactatgtgtctccattacaggccaccatcagtaaatcccagtccaaccccgtcgtgaagttaagtaataatccccaactctcctgttcctcctcacttattaagacttcagataagccacttatgtaccgccttcccttatctaccccctcacctggaaatggttctcaagggtcccaccccctggtttctaggacagtacctagcaccactacctccagtaactatttagccaaggctatggtgtcacagatctccacgcagggtttcaaatctcccttctcgatggctgcctccccaaaacttgccgcatctcccaagcctgccacatctcctaaacccctgccctcgcctaagccttctgcctcacccaagccctctctgtcagctaagccttcagtatcaactaaacttatttctaaatctaacccaactcccaagcctactgtatccccaagtagttccagtccaaatgcactagttgcccagggtagccactccagcactaacagcccagtccataaacagcccagtggaatgaacatcagcagacagtctcccaccttgaatttattgccctctagtcgcacttcaggccttccacctacaaaaaatcttcaggccccctcaaagctaacaaactcatcatccactggaactgttgggaagaatagcttgagtggaattgcaatgaatgtacctgccagcagaggtagcaaccttaactcaagcggagctaataggactagtctatctgggggaacaggaagtggaacacagggtgctaccaaaccattgtctactccacatagaccatccactgcctcagggtcttcagtggtaacagccagtgtgcaggggccttgccttagagatgtctctgaacaatttggaccctgacaagaagggtcaaggagaaatcggatactcttgtgattcccccagtcaaccactgttccagttgcttatctgctgagacagcagttcttgaccccagctacacattaagcttaaaaaaaaaaaaaattactgttgcttggacccta

SEQ ID NO: 148 - DNA, 1420 bp, Homo sapiens
gctctctggcgcggggccccttagtccgggctttttgccatggggtctctgttccctctgtcgctgctgttttttttggcggccgcctacccgggagttgggagcgcgctgggacgccggactaagcgggcgcaaagccccaagggtagccctctcgcgccctccgggacctcagtgcccttctgggtgcgcatgagcccggagttcgtggctgtgcagccggggaagtcagtgcagctcaattgcagcaacagctgtccccagccgcagaattccagcctccgcaccccgctgcggcaaggcaagacgctcagagggccgggttgggtgtcttaccagctgctcgacgtgagggcctggagctccctcgcgcactgcctcgtgacctgcgcaggaaaaacacgctgggccacctccaggatcaccgcctacaaaccgccccacagcgtgattttggagcctccggtcttaaagggcaggaaatacactttgcgctgccacgtgacgcaggtgttcccggtgggctacttggtggtgaccctgaggcatggaagccgggtcatctattccgaaagcctggagcgcttcaccggcctggatctggccaacgtgaccttgacctacgagtttgctgctggaccccgcgacttctggcagcccgtgatctgccacgcgcgcctcaatctcgacggcctggtggtccgcaacagctcggcacccattacactgatgctcggtgaggcacccctgtaaccctggggactaggaggaagggggcagagagagttatgaccccgagagggcgcacagaccaagcgtgagctccacgcgggtcgacagacctccctgtgttccgttcctaattctcgccttctgctcccagcttggagccccgcgcccacagctttggcctccggttccatcgctgcccttgtagggatcctcctcactgtgggcgctgcgtacctatgcaagtgcctagctatgaagtcccaggcgtaaagggggatgttctatgccggctgagcgagaaaaagaggaatatgaaacaatctggggaaatggccatacatggtggctgacgcctgtaatcccagcactttgggaggccgaggcaggagaatcgcttgagcccaggagttcgagaccagcctggacaacatagtgagaccccgtctatgcaaaaaatacacaaattagcctggtgtggtggcccgcacctgtggtcccagctacccgggaggctgagttgggaggatcctttgagccctgaaagtcgaggttgcagtgagccttgatcgtgccactgcactccagcctgggggacagagcacgaccctgtctccaaaaataaaataaaaataaaaataaatattggcgggggaaccctctggaatcaataaaggcttccttaaccagc

SEQ ID NO: 149 - DNA, 1145 bp, Homo sapiens
attctctccccagcttgctgagccctttgctcccctggcgactgcctggacagtcagcaaggaattgtctcccagtgcattttgccctcctggctgccaactctggctgctaaagcggctgccacctgctgcagtctacacagcttcgggaagaggaaaggaacctcagaccttccagatcgcttcctctcgcaacaaactatttgtcgcaggaataaagatggctgctgaaccagtagaagacaattgcatcaactttgtggcaatgaaatttattgacaatacgctttactttatagctgaagatgatgaaaacctggaatcagattactttggcaagcttgaatctaaattatcagtcataagaaatttgaatgaccaagttctcttcattgaccaaggaaatcggcctctatttgaagatatgactgattctgactgtagagataatgcaccccggaccatatttattataagtatgtataaagatagccagcctagaggtatggctgtaactatctctgtgaagtgtgagaaaatttcaactctctcctgtgagaacaaaattatttcctttaaggaaatgaatcctcctgataacatcaaggatacaaaaagtgacatcatattctttcagagaagtgtcccaggacatgataataagatgcaatttgaatcttcatcatacgaaggatactttctagcttgtgaaaaagagagagacctttttaaactcattttgaaaaaagaggatgaattgggggatagatctataatgttcactgttcaaaacgaagactagctattaaaatttcatgccgggcgcagtggctcacgcctgtaatcccagccctttgggaggctgaggcgggcagatcaccagaggtcaggtgttcaagaccagcctgaccaacatggtgaaacctcatctctactaaaaatacaaaaaattagctgagtgtagtgacgcatgccctcaatcccagctactcaagaggctgaggcaggagaatcacttgcactccggaggtagaggttgtggtgagccgagattgcaccattgcgctctagcctgggcaacaacagcaaaactccatctcaaaaaataaaataaataaataaacaaataaaaaattcataatgtg

SEQ ID NO: 150 - DNA, 1047 bp, Homo sapiens
ctgtgagtgacacacgctgagtggggtgaagggaaatgctggtgaatttcattttgaggtgtgggttgctgttagtcactctgtctcttgccattgccaagcacaagcaatcttccttcaccaaaagttgttacccaaggggaacattgtcccaagctgttgacgctctctatatcaaagcagcatggctcaaagcaacgattccagaagaccgcataaaaaatatacgattattaaaaaagaaaacaaaaaagcagtttatgaaaaactgtcaatttcaagaacagcttctgtccttcttcatggaagacgtttttggtcaactgcaattgcaaggctgcaagaaaatacgctttgtggaggactttcatagccttaggcagaaattgagccactgtatttcctgtgcttcatcagctagagagatgaaatccattaccaggatgaaaagaatattttataggattggaaacaaaggaatctacaaagccatcagtgaactggatattcttctttcctggattaaaaaattattggaaagcagtcagtaaaccaaagccaagtacattgattttacagttattttgaaatacaataagaactgctagaaatatgtttataacagtctatttcttttaaaaactttttaacataatactgacggcatgttaggtgattcagaatagacaagaaggatttagtaaattaacgttttggatataagttgtcactaatttgcacattttctgtgttttcaaataatgtttccattctgaacatgttttgtcattcacaagtacattgtgtcaacttaatttaaagtatgtaacctgaattaactcgtgtaatatttgtgtgtggagtgggatgtggggggtggagggggaatgacagatttctggaatgcaatgtaatgttactgagacttaaatagatgttatgtatatgattgtctgtttaagtgtttgaaaattgttaattatgcccagtgtgaacttagtacttaacacattttgattttaattaaataaattgggtttccttctc

SEQ ID NO: 151 - DNA, 5054 bp, Homo sapiens
atgggagacgtaaaagcgttgctgtttgtcgttgctgcccgggccagacgtttaggaggagccgctgcatccgagtccctggctgtctccgaagccttctgcagggtccgaagctgccagcccaaaaagtgtgcaggcccccagcggtgcctgaacccagtgcctgcagtgcccagtcccagccccagcgtgaggaagagacaggtgtccctcaactggcagccactgacgctccaggaggccagagctctactgaagcggcggcggccccgggggccagggggccggggactactgagaaggaggcccccacagcgtgcccccgctggcaaggccccggtcctgtgtcccttgatctgtcacaatggcggtgtgtgcgtgaagcctgaccgctgcttctgtcccccggacttcgctggcaagttctgccagttgcactcctcgggcgcccggcccccggccccggctgtaccaggcctcacccgctccgtgtacactatgccactggccaaccaccgcgacgacgagcacggcgtggcatctatggtgagcgtccacgtggagcacccgcaggaggcgtcggtggtggtgcaccaggtggagcgtgtgtctggcccttgggaggaggcggacgctgaggcggtggcgcgggcggaagcggcggcgcgggcggaggcggcagcgccctacacggtgttggcacagagcgcgccgcgggaggacggctactcagatgcctcgggcttcggttactgctttcgggagctgcgcggaggcgaatgcgcgtccccgctgcccgggctccggacgcaggaggtctgctgccgaggggccggcttggcctggggcgttcacgactgtcagctgtgctccgagcgcctggggaactccgaaagagtgagcgccccagatggaccttgtccaaccggctttgaaagagttaatgggtcctgcgaagatgtggatgagtgcgcgactggcgggcgctgccagcacggcgagtgtgcaaacacgcgcggcgggtacacgtgtgtgtgccccgacggctttctgctcgactcgtcccgcagcagctgcatctcccaacacgtgatctcagaggccaaagggccctgcttccgcgtgctccgcgacggcggctgttcgctgcccattctgcggaacatcactaaacagatctgctgctgcagccgcgtaggcaaggcctggggccggggctgccagctctgcccacccttcggctcagagggtttccgggagatctgcccggctggtcctggttaccactactcggcctccgacctccgctacaacaccagacccctgggccaggagccaccccgagtgtcactcagccagcctcgtaccctgccagccacctctcggccatctgcaggctttctgcccacccatcgcctggagccccggcctgaaccccggcccgatccccggcccggccctgagcttcccttgcccagcatccctgcctggactggtcctgagattcctgaatcaggtccctcctccggcatgtgtcagcgcaacccccaggtctgcggcccaggacgctgcatttcccggcccagcggctacacctgcgcttgcgactctggcttccggctcagcccccagggcacccgatgcattgatgtggacgaatgtcgccgcgtgcccccgccctgtgctcccgggcgctgcgagaactcaccaggcagcttccgctgcgtgtgcggcccgggcttccgagccggcccacgggctgcggaatgcctggatgtggacgagtgccaccgcgtgccgccgccgtgtgacctcgggcgctgcgagaacacgccaggcagcttcctgtgcgtgtgccccgccgggtaccaggctgcaccgcacggagccagctgccaggatgtggatgaatgcacccagagcccaggcctgtgtggccgagggggctgcaagaacctgcctggctctttccgctgtgtttgcccggctggcttccggggctcggcgtgtgaagaggatgtggatgagtgtgcccaggaaccgccgccctgtgggcccggccgctgtgacaacacggcaggctcctttcactgtgcctgccctgctggcttccgctcccgagggcccggggccccctgccaagatgtggatgagtgtgcccgaagccccccaccctgcacctacgggcggtgtgagaacacagaaggcagcttccagtgtgtctgccccatgggcttccaacccaacactgctggctccgagtgcgaagatgtggatgaatgtgaaaaccacctcgcatgccctgggcaggaatgtgtgaactcgcccggctccttccagtgcaggacctgtccttctggccaccacctgcaccgtggcagatgcactgatgtggacgaatgcagttcgggtgcccctccctgtggtccccacggccactgcactaacaccgaaggctccttccgctgcagctgcgcgccaggctaccgggcgccgtcgggtcggcccgggccctgcgcagacgtgaacgagtgcctggagggcgatttctgcttccctcacggcgagtgcctcaacactgacggctcctttgcctgtacttgtgcccctggctaccgacccggaccccgcggagcctcttgcctcgacgttgacgagtgcagcgaggaggacctttgccagagcggcatctgtaccaacaccgacggctccttcgagtgcatctgtcctccgggacaccgcgctggtccggacctcgcctcctgtctcgacgtggacgaatgtcgcgagcgaggtccagccctgtgcgggtcgcagcgttgtgagaactctcccggctcctaccgctgtgtccgggactgcgatcctgggtaccacgcgggccccgagggcacctgtgacgatgtggatgagtgccaagaatatggtcccgagatttgtggagcccagcgttgtgagaacacccctggctcctaccgctgtacaccagcctgtgaccctggctatcagcccacgccagggggcggatgccaggatgtggacgaatgccggaaccggtccttctgcggtgcccacgccgtgtgccagaacctgcccggctccttccagtgcctctgtgaccagggttacgagggggcacgggatgggcgtcactgcgtggatgtgaacgagtgtgaaacactacagggtgtatgtggagctgccctgtgtgaaaatgtcgaaggctccttcctctgtgtctgccccaacagcccggaagagtttgaccccatgactggacgctgtgttcccccacgaacttctgttggcatgtccccaggctcgcagccccaggcacctgttagccccgttctgcccgccaggccacctccgccacccctgtcccgccgacccagaaaacctaggaagggccctgtggggagtgggtgccgggagtgctattttgacacagcggccccggatgcatgtgacaacatcctggctcggaatgtgacatggcaggagtgctgctgtactgtgggtgagggctggggcagcggctgccgcatccagcagtgcccgggcaccgagacagctgagtaccagtcattgtgccctcacggccggggctacctggcgcccagtggagacctgagcctccggagagacgtggacgaatgtcagctcttccgagaccaggtgtgcaagagtggcgtgtgtgtgaacacggccccgggctactcatgctattgcagcaacggctactactaccacacacagcggctggagtgcatcgataatgacgagtgcgccgatgaggaaccggcctgtgagggcggccgctgtgtcaacactgtgggctcttatcactgtacctgcgagcccccactggtgctggatggctcgcagcgccgctgcgtctccaacgagagccagagcctcgatgacaatctgggagtgtgctggcaggaagtgggggctgacctcgtgtgcagccaccctcggctggaccgtcaggccacctacacagagtgctgctgcctgtatggagaggcctggggcatggactgcgccctctgccctgcgcaggactcagatgacttcgaggccctgtgcaatgtgctacgcccccccgcatatagccccccgcgaccaggtggctttggactcccctacgagtacggcccagacttaggtccaccttaccagggcctcccatatgggcctgagttgtacccaccacctgcgctaccctacgacccctacccaccgccacctgggcccttcgcccgccgggaggctccttatggggcaccccgcttcgacatgccagactttgaggacgatggtggcccctatggcgaatctgaggctcctgcgccacctggcccgggcacccgctggccctatcggtcccgggacacccgccgctccttcccagagcccgaggagcctcctgaaggtggaagctatgctggttccctggctgagccctacgaggagctggaggcggaggagtgcgggatcctggacggctgcaccaacgaccgctgcgtgcgcgtccccgaaggcttcacctgccgttgcttcgacggctaccgcctggacatgacccgcatggcctgcgttgacatcaacgagtgtgatgaggccgaggctgcctccccgctgtgcgtcaacgcgcgttgcctcaacacggatggctccttccgctgcatctgccgcccgggattcgcacccacgcaccagccgcaccactgtgcgcccgcacggccccgggcctgagccctggcacccgctggccacccacccgcgcccgccactcggggcccctgccgcgcatcctgcagcccgcttatgcgtatgtgcacggggccgcccgcctggacctggagaagggacctacggacgcctggaagctgcgacgccctgcactgctcccgcctccaccagcgcctcccactgatgtcgtggtcccgggcctggcccaggggcccctttacatgccctctcccttttataaaattttccattaaaaaccacctattttctaaaaaaaaaaaaaaaaaaaaaaa

SEQ ID NO: 152 - DNA, 2136 bp, Homo sapiens
gccctggaggcccggcctggccgctcccggccctggggtgcacatcggccctgagtcccgtcccaggctctgggctcgggcagccgccgccaccgctgcccaggacgtcgggcctcctgccttcctcccaggcccccacgttgctggccgcctggccgagtggccgccatgctcctgccttgggccacctctgcccccggcctggcctgggggcctctggtgctgggcctcttcgggctcctggcagcatcgcagccccaggcggtgcctccatatgcgtcggagaaccagacctgcagggaccaggaaaaggaatactatgagccccagcaccgcatctgctgctcccgctgcccgccaggcacctatgtctcagctaaatgtagccgcatccgggacacagtttgtgccacatgtgccgagaattcctacaacgagcactggaactacctgaccatctgccagctgtgccgcccctgtgacccagtgatgggcctcgaggagattgccccctgcacaagcaaacggaagacccagtgccgctgccagccgggaatgttctgtgctgcctgggccctcgagtgtacacactgcgagctactttctgactgcccgcctggcactgaagccgagctcaaagatgaagttgggaagggtaacaaccactgcgtcccctgcaaggcagggcacttccagaatacctcctcccccagcgcccgctgccagccccacaccaggtgtgagaaccaaggtctggtggaggcagctccaggcactgcccagtccgacacaacctgcaaaaatccattagagccactgcccccagagatgtcaggaaccatgctgatgctggccgttctgctgccactggccttctttctgctccttgccaccgtcttctcctgcatctggaagagccacccttctctctgcaggaaactgggatcgctgctcaagaggcgtccgcagggagagggacccaatcctgtagctggaagctgggagcctccgaaggcccatccatacttccctgacttggtacagccactgctacccatttctggagatgtttccccagtatccactgggctccccgcagccccagttttggaggcaggggtgccgcaacagcagagtcctctggacctgaccagggagccgcagttggaacccggggagcagagccaggtggcccacggtaccaatggcattcatgtcaccggcgggtctatgactatcactggcaacatctacatctacaatggaccagtactggggggaccaccgggtcctggagacctcccagctacccccgaacctccataccccattcccgaagagggggaccctggccctcccgggctctctacaccccaccaggaagatggcaaggcttggcacctagcggagacagagcactgtggtgccacaccctctaacaggggcccaaggaaccaatttatcacccatgactgacggagtctgagaaaaggcagaagaaggggggcacaagggcactttctcccttgaggctgccctgcccacgtgggattcacaggggcctgagtagggcccggggaagcagagccctaagggattaaggctcagacacctctgagagcaggtgggcactggctgggtacggtgccctccacaggactctccctactgcctgagcaaacctgaggcctcccggcagacccacccaccccctggggctgctcagcctcaggcacggacagggcacatgataccaactgctgcccactacggcacgccgcaccggagcacggcaccgagggagccgccacacggtcacctgcaaggacgtcacgggcccctctaaaggattcgtggtgctcatccccaagcttcagagaccctttggggttccacacttcacgtggactgaggtagaccctgcatgaagatgaaattatagggaggacgctccttccctcccctcctagaggagaggaaagggagtcattaacaactagggggttgggtaggattcctaggtatggggaagagttttggaaggggaggaaaatggcaagtgtatttatattgtaaccacatgcaaataaaaagaatgggacctaaactcgtgccgctcgtgccgaattcctgcag

SEQ ID NO: 153 - DNA, 3939 bp, Homo sapiens
cctgggtcctctcggcgccagagccgctctccgcatcccaggacagcggtgcggccctcggccggggcgcccactccgcagcagccagcgagccagctgccccgtatgaccgcgccgggcgccgccgggcgctgccctcccacgacatggctgggctccctgctgttgttggtctgtctcctggcgagcaggagtatcaccgaggaggtgtcggagtactgtagccacatgattgggagtggacacctgcagtctctgcagcggctgattgacagtcagatggagacctcgtgccaaattacatttgagtttgtagaccaggaacagttgaaagatccagtgtgctaccttaagaaggcatttctcctggtacaagacataatggaggacaccatgcgcttcagagataacaccgccaatcccatcgccattgtgcagctgcaggaactctctttgaggctgaagagctgcttcaccaaggattatgaagagcatgacaaggcctgcgtccgaactttctatgagacacctctccagttgctggagaaggtcaagaatgtctttaatgaaacaaagaatctccttgacaaggactggaatattttcagcaagaactgcaacaacagctttgctgaatgctccagccaagatgtggtgaccaagcctgattgcaactgcctgtaccccaaagccatccctagcagtgacccggcctctgtctcccctcatcagcccctcgccccctccatggcccctgtggctggcttgacctgggaggactctgagggaactgagggcagctccctcttgcctggtgagcagcccctgcacacagtggatccaggcagtgccaagcagcggccacccaggagcacctgccagagctttgagccgccagagaccccagttgtcaaggacagcaccatcggtggctcaccacagcctcgcccctctgtcggggccttcaaccccgggatggaggatattcttgactctgcaatgggcactaattgggtcccagaagaagcctctggagaggccagtgagattcccgtaccccaagggacagagctttccccctccaggccaggagggggcagcatgcagacagagcccgccagacccagcaacttcctctcagcatcttctccactccctgcatcagcaaagggccaacagccggcagatgtaactgctacagccttgcccagggtgggccccgtgatgcccactggccaggactggaatcacaccccccagaagacagaccatccatctgccctgctcagagaccccccggagccaggctctcccaggatctcatcactgcgcccccaggccctcagcaacccctccaccctctctgctcagccacagctttccagaagccactcctcgggcagcgtgctgccccttggggagctggagggcaggaggagcaccagggatcggacgagccccgcagagccagaagcagcaccagcaagtgaaggggcagccaggcccctgccccgttttaactccgttcctttgactgacacaggccatgagaggcagtccgagggatcctccagcccgcagctccaggagtctgtcttccacctgctggtgcccagtgtcatcctggtcttgctggctgtcggaggcctcttgttctacaggtggaggcggcggagccatcaagagcctcagagagcggattctcccttggagcaaccagagggcagccccctgactcaggatgacagacaggtggaactgccagtgtagagggaattctaagctggacgcacagaacagtctcttcgtgggaggagacattatggggcgtccaccaccacccctccctggccatcctcctggaatgtggtctgccctccaccagagctcctgcctgccaggactggaccagagcagccaggctggggcccctctgtctcaacccgcagacccttgactgaatgagagaggccagaggatgctccccatgctgccactatttattgtgagccctggaggctcccatgtgcttgaggaaggctggtgagcccggctcaggaccctcttccctcaggggctgcagcctcctctcactcccttccatgccggaacccaggccagggacccaccggcctgtggtttgtgggaaagcagggtgcacgctgaggagtgaaacaaccctgcacccagagggcctgcctggtgccaaggtatcccagcctggacaggcatggacctgtctccagacagaggagcctgaagttcgtggggcgggacagcctcggcctgatttcccgtaaaggtgtgcagcctgagagacgggaagaggaggcctctgcacctgctggtctgcactgacagcctgaagggtctacaccctcggctcacctaagtccctgtgctggttgccaggcccagaggggaggccagccctgccctcaggacctgcctgacctgccagtgatgccaagagggggatcaagcactggcctctgcccctcctccttccagcacctgccagagcttctccagcaggccaagcagaggctcccctcatgaaggaagccattgcactgtgaacactgtacctgcctgctgaacagcctccccccgtccatccatgagccagcatccgtccgtcctccactctccagcctctccccagcctcctgcactgagctggcctcaccagtcgactgagggagcccctcagccctgaccttctcctgacctggcctttgactccccggagtggagtggggtgggagaacctcctgggccgccagccagagccgctctttaggctgtgttcttcgcccaggtttctgcatcttccactttgacattcccaagagggaagggactagtgggagagagcaagggaggggagggcacagacagagagcctacagggcgagctctgactgaagatgggcctttgaaatataggtatgcacctgaggttgggggagggtctgcactcccaaaccccagcgcagtgtcctttccctgctgccgacaggaacctggggctgagcaggttatccctgtcaggagccctggactgggctgcatctcagccccacctgcatggtatccagctcccatccacttctcacccttctttcctcctgaccttggtcagcagtgatgacctccaactctcacccaccccctctaccatcacctctaaccaggcaagccagggtgggagagcaatcaggagagccaggcctcagcttccaatgcctggagggcctccactttgtggccagcctgtggtgctggctctgaggcctaggcaacgagcgacagggctgccagttgcccctgggttcctttgtgctgctgtgtgcctcctctcctgccgccctttgtcctccgctaagagaccctgccctacctggccgctgggccccgtgactttcccttcctgcccaggaaagtgagggtcggctggccccaccttccctgtcctgatgccgacagcttagggaagggcactgaacttgcatatggggcttagccttctagtcacagcctctatatttgatgctagaaaacacatatttttaaatggaagaaaaataaaaaggcattcccccttcatccccctaccttaaacatataatattttaaaggtcaaaaaagcaatccaacccactgcagaagctctttttgagcacttggtggcatcagagcaggaggagccccagagccacctctggtgtcccccaggctacctgctcaggaaccccttctgttctctgagaactcaacagaggacattggctcacgcactgtgagattttgtttttatacttgcaactggtgaattattttttataaagtcatttaaatatctatttaaaagataggaagctgcttatatatttaataataaaagaagtgcacaagctgccgttgacgtagctcgag

SEQ ID NO: 154 - DNA, 7495 bp, Homo sapiens
cacagagcgacagagacatttattgttatttgttttttggtggcaaaaagggaaaatggcgaacgactcccctgcaaaaagtctggtggacatcgacctctcctccctgcgggatcctgctgggatttttgagctggtggaagtggttggaaatggcacctatggacaagtctataagggtcgacatgttaaaacgggtcagttggcagccatcaaagttatggatgtcactgaggatgaagaggaagaaatcaaactggagataaatatgctaaagaaatactctcatcacagaaacattgcaacatattatggtgctttcatcaaaaagagccctccaggacatgatgaccaactctggcttgttatggagttctgtggggctgggtccattacagaccttgtgaagaacaccaaagggaacacactcaaagaagactggatcgcttacatctccagagaaatcctgaggggactggcacatcttcacattcatcatgtgattcaccgggatatcaagggccagaatgtgttgctgactgagaatgcagaggtgaaacttgttgactttggtgtgagtgctcagctggacaggactgtggggcggagaaatacgttcataggcactccctactggatggctcctgaggtcatcgcctgtgatgagaacccagatgccacctatgattacagaagtgatctttggtcttgtggcattacagccattgagatggcagaaggtgctccccctctctgtgacatgcatccaatgagagcactgtttctcattcccagaaaccctcctccccggctgaagtcaaaaaaatggtcgaagaagttttttagttttatagaagggtgcctggtgaagaattacatgcagcggccctctacagagcagcttttgaaacatccttttataagggatcagccaaatgaaaggcaagttagaatccagcttaaggatcatatagatcgtaccaggaagaagagaggcgagaaagatgaaactgagtatgagtacagtgggagtgaggaagaagaggaggaagtgcctgaacaggaaggagagccaagttccattgtgaacgtgcctggtgagtctactcttcgccgagatttcctgagactgcagcaggagaacaaggaacgttccgaggctcttcggagacaacagttactacaggagcaacagctccgggagcaggaagaatataaaaggcaactgctggcagagagacagaagcggattgagcagcagaaagaacagaggcgacggctagaagagcaacaaaggagagagcgggaagctagaaggcagcaggaacgtgaacagcgaaggagagaacaagaagaaaagaggcgtctagaggagttggagagaaggcgcaaagaagaagaggagaggagacgggcagaagaagaaaagaggagagttgaaagagaacaggagtatatcaggcgacagctagaagaggagcagcggcacttggaagtccttcagcagcagctgctccaggagcaggccatgttactggagtgccgatggcgggagatggaggagcaccggcaggcagagaggctccagaggcagttgcaacaagaacaagcatatctcctgtctctacagcatgaccataggaggccgcacccgcagcactcgcagcagccgccaccaccgcagcaggaaaggagcaagccaagcttccatgctcccgagcccaaagcccactacgagcctgctgaccgagcgcgagaggtggaagatagatttaggaaaactaaccacagctcccctgaagcccagtctaagcagacaggcagagtattggagccaccagtgccttcccgatcagagtctttttccaatggcaactccgagtctgtgcatcccgccctgcagagaccagcggagccacaggtacagtggtcccacctggcatctctcaagaacaatgtttcccctgtctcgcgatcccattccttcagtgacccttctcccaaatttgcacaccaccatcttcgttctcaggacccatgtccaccttcccgcagtgaggtgctcagtcagagctctgactctaagtcagaggcgcctgaccctacccaaaaggcttggtctagatcagacagtgacgaggtgcctccaagggttcctgtgagaacaacatctcgctcccctgttctgtcccgtcgagattccccactgcagggcagtgggcagcagaatagccaggcaggacagagaaactccaccagcagtattgagcccaggcttctgtgggagagagtggagaagctggtgcccagacctggcagtggcagctcctcagggtccagcaactcaggatcccagcccgggtctcaccctgggtctcagagtggctccggggaacgcttcagagtgagatcatcatccaagtctgaaggctctccatctcagcgcctggaaaatgcagtgaaaaaacctgaagataaaaaggaagttttcagacccctcaagcctgctggcgaagtggatctgaccgcactggccaaagagcttcgagcagtggaagatgtacggccacctcacaaagtaacggactactcctcatccagtgaggagtcggggacgacggatgaggaggacgacgatgtggagcaggaaggggctgacgagtccacctcaggaccagaggacaccagagcagcgtcatctctgaatttgagcaatggtgaaacggaatctgtgaaaaccatgattgtccatgatgatgtagaaagtgagccggccatgaccccatccaaggagggcactctaatcgtccgccagactcagtccgctagtagcacactccagaaacacaaatcttcctcctcctttacaccttttatagaccccagattactacagatttctccatctagcggaacaacagtgacatctgtggtgggattttcctgtgatgggatgagaccagaagccataaggcaagatcctacccggaaaggctcagtggtcaatgtgaatcctaccaacactaggccacagagtgacaccccggagattcgtaaatacaagaagaggtttaactctgagattctgtgtgctgccttatggggagtgaatttgctagtgggtacagagagtggcctgatgctgctggacagaagtggccaagggaaggtctatcctcttatcaaccgaagacgatttcaacaaatggacgtacttgagggcttgaatgtcttggtgacaatatctggcaaaaaggataagttacgtgtctactatttgtcctggttaagaaataaaatacttcacaatgatccagaagttgagaagaagcagggatggacaaccgtaggggatttggaaggatgtgtacattataaagttgtaaaatatgaaagaatcaaatttctggtgattgctttgaagagttctgtggaagtctatgcgtgggcaccaaagccatatcacaaatttatggcctttaagtcatttggagaattggtacataagccattactggtggatctcactgttgaggaaggccagaggttgaaagtgatctatggatcctgtgctggattccatgctgttgatgtggattcaggatcagtctatgacatttatctaccaacacatatccagtgtagcatcaaaccccatgcaatcatcatcctccccaatacagatggaatggagcttctggtgtgctatgaagatgagggggtttatgtaaacacatatggaaggatcaccaaggatgtagttctacagtggggagagatgcctacatcagtagcatatattcgatccaatcagacaatgggctggggagagaaggccatagagatccgatctgtggaaactggtcacttggatggtgtgttcatgcacaaaagggctcaaagactaaaattcttgtgtgaacgcaatgacaaggtgttctttgcctctgttcggtctggtggcagcagtcaggtttatttcatgaccttaggcaggacttctcttctgagctggtagaagcagtgtgatccagggattactggcctccagagtcttcaagatcctgagaacttggaattccttgtaactggagctcggagctgcaccgagggcaaccaggacagctgtgtgtgcagacctcatgtgttgggttctctcccctccttcctgttcctcttatataccagtttatccccattctttttttttttcttactccaaaataaatcaaggctgcaatgcagctggtgctgttcagattctaccatcaggtgctataagtgtttgggattgagcatcatactggaaagcaaacacctttcctccagctccagaattccttgtctctgaatgactctgtcttgtgggtgtctgacagtggcgacgatgaacatgccgttggttttattggcagtgggcacaaggaggtgagaagtggtggtaaaaggagcggagtgctgaagcagagagcagatttaatatagtaacattaacagtgtatttaattgacatttcttttttgtaatgtgacgatatgtggacaaagaagaagatgcaggtttaagaagttaatatttataaaatgtgaaagacacagttactaggataacttttttgtgggtggggcttgggagatggggtggggtgggttaaggggtcccattttgtttctttggatttggggtgggggtcctggccaagaactcagtcatttttctgtgtaccaggttgcctaaatcatgtgcagatggttctaaaaaaaaaaaaaaaaaaaaaaaaaaaaggaaaaaaaaaaagaaaaagaaaacgtgtgcattttgtataatggccagaactttgtcgtgtgacagtattagcactgcctcagttaaaggtttaatttttgtttaaacctagacgtgcaacaaaagttttaccacagtctgcacttgcagaagaaagaaaaaaattcaaaccacatgtttattttttttttgcctacctcattgttcttaatgcattgagaggtgatttagtttatatgtttttggaagaaaccattaatgtttaatttaatcttaataccaaaacgaccagattgaagtttgacttttattgtcacaaatcagcaggcacaagaactgtccatgaagatgggaaatagccttaaggctgatgcagtttacttacaagtttagaaaccagaatgctttgtttttaccagattcaccattagaggttgatggggcaactgcagcccatgacacaagatctcattgttctcgatgtagaggggttggtagcagacaggtggttacattagaatagtcacacaaactgttcagtgttgcaggaaccttttcttgggggtgggggagtttcccttttctaaaaatgcaatgcactaaaactattttaagaatgtagttaattctgcttattcataaagtgggcatcttctgtgttttaggtgtaatatcgaagtcctggcttttctcgttttctcacttgctctcttgttctctgtttttttaaaccaattttactttatgaatatattcatgacatttgtaataaatgtcttgagaaagaatttgtttcatggcttcatggtcatcactcaagctcccgtaaggatattaccgtctcaggaaaggatcaggactccatgtcacagtcctgccatcttactttcctcttgtcgagttctgagtggaaataactgcattatggctgctttaacctcagtcatcaaaagaaacttgctgttttttaggcttgatctttttcctttgtggttaattttcctgtatattgtgaaaatgggggattttccctctgctcccacccacctaaacacagcagccatttgtacctgtttgcttcccatcccacttggcacccactctgacctcttgtcagtttcctgttcctggttccatctttttgaaaaaggccctcctttgagctacaaacatctggtaagacaagtacatccactcatgaatgcagacacagcagctggtggttttgtgtatacctgtaaagacaagctgagaagcttactttttggggaagtaaaagaagatggaaatggatgtttcatttgtatgagtttggagcagtgctgaaggccaaagccgcctactggtttgtagttaacctagagaaggttgaaaaattaatcctacctttaaagggatttgaggtaggctggattccatcgccacaggactttagttagaattaaattcctgcttgtaatttatatccatgtttaggcttttcataagatgaaacatgccacagtgaacacactcgtgtacatatcaagagaagaaggaaaggcacaggtggagaacagtaaaaggtgggcagatgtctttgaagaaatgctcaatgtctgatgctaagtgggagaaggcagagaacaaaggatgtggcataatggtcttaacattatccaaagacttgaagctccatgtctgtaagtcaaatgttacacaaaaaaaaatgcaaatggtgtttcattggaattaccaagtgcttagaacttgctggctttcccataggtggtaaaggggtctgagctcacaccgagttgtgcttggcttgcttgtgcagctccaggcacccggtgggcactctggtggtgtttgtggtgaactgaattgaatccattgttgggcttaagttactgaaattggaacaccctttgtccttctcggcgggggcttcctggtctgtgctttacttggcttttttccttcccgtcttagcctcacccccttgtcaaccagattgagttgctatagcttgatgcagggacccagtgaagtttctccgttaaagattgggagtcgtcgaaatgtttagattcttttaggaaaggaattattttccccccttttacagggtagtaacttctccacagaagtgccaatatggcaaaattacacaagaaaacagtattgcaatgacaccattacataaggaacattgaactgttagaggagtgctcttccaaacaaaacaaaaatgtctctaggtttagtcagagctttcacaagtaataacctttctgtattaaaatcagagtaaccctttctgtattgagtgcagtgttttttactcttttctcatgcacatgttacgttggagaaaatgtttacaaaaatggttttgttacactaatgcgcaccacatatttatggtttattttaagtgactttttatgggttatttaggttttcgtcttagttgtagcacacttaccctaattttgccaattattaatttgctaaatagtaatacaaatgacaaactgcattaaatttactaattataaaagctgcaaagcagactggtggcaagtacacagcccttttttttgcagtgctaacttgtctactgtgtattatgaaaattactgttgtccccccacccttttttccttaaataaagtaaaaatgacacctaaaaaaaaaaaaaaaaaaaaaaaaaaaaaaaaaaaaa

SEQ ID NO: 155 - DNA, 2420 bp, Homo sapiens
tcgggcgcgggcgcggggcgcggggctgggcccgggcggagcggcggctgctccggacatgtcgggccctcgcgccggcttctaccggcaggagctgaacaagaccgtgtgggaggtgccgcagcggctgcaggggctgcgcccggtgggctccggcgcctacggctccgtctgttcggcctacgacgcccggctgcgccagaaggtggcggtgaagaagctgtcgcgccccttccagtcgctgatccacgcgcgcagaacgtaccgggagctgcggctgctcaagcacctgaagcacgagaacgtcatcgggcttctggacgtcttcacgccggccacgtccatcgaggacttcagcgaagtgtacttggtgaccaccctgatgggcgccgacctgaacaacatcgtcaagtgccaggcgctgagcgacgagcacgttcaattcctggtttaccagctgctgcgcgggctgaagtacatccactcggccgggatcatccaccgggacctgaagcccagcaacgtggctgtgaacgaggactgtgagctcaggatcctggatttcgggctggcgcgccaggcggacgaggagatgaccggctatgtggccacgcgctggtaccgggcacctgagatcatgctcaactggatgcattacaaccaaacagtggatatctggtccgtgggctgcatcatggctgagctgctccagggcaaggccctcttcccgggaagcgactacattgaccagctgaagcgcatcatggaagtggtgggcacacccagccctgaggttctggcaaaaatctcctcagaacacgcccggacatatatccagtccctgccccccatgccccagaaggacctgagcagcatcttccgtggagccaaccccctggccatagacctccttggaaggatgctggtgctggacagtgaccagagggtcagtgcagctgaggcactggcccacgcctacttcagccagtaccacgaccccgaggatgagccagaggccgagccatatgatgagagcgttgaggccaaggagcgcacgctggaggagtggaaggagctcacttaccaggaagtcctcagcttcaagcccccagagccaccgaagccacctggcagcctggagattgagcagtgaggtgctgcccagcagcccctgagagcctgtggaggggcttgggcctgcacccttccacagctggcctggtttcctcgagaggcacctcccacactcctatggtcacagacttctggcctaggacccctcgccttcaggagaatctacacgcatgtatgcatgcacaaacatgtgtgtacatgtgcttgccatgtgtaggagtctgggcacaagtgtccctgggcctaccttggtcctcctgtcctcttctggctactgcactctccactgggacctgactgtggggtcctagatgccaaaggggttcccctgcggagttcccctgtctgtcccaggccgacccaagggagtgtcagccttgggctctcttctgtcccagggctttctggaggacgcgctggggccgggaccccgggagactcaaagggagaggtctcagtggttagagctgctcagcctggaggtagggggctgtcttggtcactgctgagacccacaggtctaagaggagaggcagagccagtgtgccaccaggctgggcagggacaaccaccaggtgtcaaatgagaaaagctgcctggagtcttgtgttcacccgtgggtgtgtgtgggcacgtgtggatgagcgtgcactccccgtgttcatatgtcagggcacatgtgatgtggtgcgtgtgaatctgtgggcgcccaaggccagcagccatatctggcaagaagctggagccggggtgggtgtgctgttgccttccctctcctcggttcctgatgccttgaggggtgtttcagactggcggctccagtgggccaaagggcaaccacatgagcatgggcaggggctttctccttggatgtgggacccacagcagcttcctgaggctgggggtgggtgggtgggtggtttggccttgaggacgctagggcaggcagcacacctggatgtggacttggactcggacacttctgccctgcaccctggcccgctctctacctctgcccaccgttgtggccctgcagccggagatctgaggtgctctggtctgtgggtcagtcctctttccttgtcccaggatggagctgatccagtaacctcggagacgggaccctgcccagagctgagttgggggtgtggctctgccctggaaagggggtgacctcttgcctcgaggggcccagggaagcctgggtgtcaagtgcctgcaccaggggtgcacaataaagggggttctctctcaaaaaaaaaaaaaaaaaaaaaaaaaaaaaaaaa

SEQ ID NO: 156 - DNA, 2813 bp, Homo sapiens
ggacagggcagctcaagacgctgaggtggtggctgcggcctttgaacaaacaccatggccgagcctctgaaggaggaagacggcgaggacggctctgcggagccccccgggcccgtgaaggtcgaacccgcccacaccgctgcctctgtagcggccaagaacctggccctgcttaaagcccgctccttcgatgtgacctttgacgtgggcgacgagtacgagatcatcgagaccataggcaacggggcctatggagtggtgtcctccgcccgccgccgcctcaccggccagcaggtggccatcaagaagatccctaatgctttcgatgtggtgaccaatgccaagcggaccctcagggagctgaagatcctcaagcactttaaacacgacaacatcatcgccatcaaggacatcctgaggcccaccgtgccctatggcgaattcaaatctgtctacgtggtcctggacctgatggaaagcgacctgcaccagatcatccactcctcacagcccctcacactggaacacgtgcgctacttcctgtaccaactgctgcggggcctgaagtacatgcactcggctcaggtcatccaccgtgacctgaagccctccaacctattggtgaatgagaactgtgagctcaagattggtgactttggtatggctcgtggcctgtgcacctcgcccgctgaacatcagtacttcatgactgagtatgtggccacgcgctggtaccgtgcgcccgagctcatgctctctttgcatgagtatacacaggctattgacctctggtctgtgggctgcatctttggtgagatgctggcccggcgccagctcttcccaggcaaaaactatgtacaccagctacagctcatcatgatggtgctgggtaccccatcaccagccgtgattcaggctgtgggggctgagagggtgcgggcctatatccagagcttgccaccacgccagcctgtgccctgggagacagtgtacccaggtgccgaccgccaggccctatcactgctgggtcgcatgctgcgttttgagcccagcgctcgcatctcagcagctgctgcccttcgccaccctttcctggccaagtaccatgatcctgatgatgagcctgactgtgccccgccctttgactttgcctttgaccgcgaagccctcactcgggagcgcattaaggaggccattgtggctgaaattgaggacttccatgcaaggcgtgagggcatccgccaacagatccgcttccagccttctctacagcctgtggctagtgagcctggctgtccagatgttgaaatgcccagtccctgggctcccagtggggactgtgccatggagtctccaccaccagccccgccaccatgccccggccctgcacctgacaccattgatctgaccctgcagccacctccaccagtcagtgagcctgccccaccaaagaaagatggtgccatctcagacaatactaaggctgcccttaaagctgccctgctcaagtctttgaggagccggctcagagatggccccagcgcacccctggaggctcctgagcctcggaagccggtgacagcccaggagcgccagcgggagcgggaggagaagcggcggaggcggcaagaacgagccaaggagcgggagaaacggcggcaggagcgggagcgaaaggaacggggggctggggcctctgggggcccctccactgaccccttggctggactagtgctcagtgacaatgacagaagcctgttggaacgctggactcgaatggcccggcccgcagccccagccctcacctctgtgccggcccctgccccagcgccaacgccaaccccaaccccagtccaacctaccagtcctcctcctggccctgtagcccagcccactggcccgcaaccacaatctgcgggctctacctctggccctgtaccccagcctgcctgcccaccccctggccctgcaccccaccccactggccctcctgggcccatccctgtccccgcgccaccccagattgccacctccaccagcctcctggctgcccagtcacttgtgccaccccctgggctgcctggctccagcaccccaggagttttgccttacttcccacctggcctgccgcccccagacgccgggggagcccctcagtcttccatgtcagagtcacctgatgtcaaccttgtgacccagcagctatctaagtcacaggtggaggaccccctgccccctgtgttctcaggcacaccaaagggcagtggggctggctacggtgttggctttgacctggaggaattcttaaaccagtctttcgacatgggcgtggctgatgggccacaggatggccaggcagattcagcctctctctcagcctccctgcttgctgactggctcgaaggccatggcatgaaccctgccgatattgagtccctgcagcgtgagatccagatggactccccaatgctgctggctgacctgcctgacctccaggacccctgaggcccccagcctgtgccttgctgccacagtagacctagttccaggatccatgggagcattctcaaaggctttagccctggacccagcaggtgaggctcggcttggattattctgcaggttcatctcagacccacctttcagccttaagcagccacctgagccaccaccgagccatggcaggatcgggagaccccaactccccctgaacaatccttttcagtattatatttttattattattatgttattattacactgtctttttgccatcaaaatgaggcctgtgaaatacaaggttcccttctgca

SEQ ID NO: 157 - DNA, 375 bp, Homo sapiens
gtggattttccttttaatgcaaaatgttgcaatacaaaacaatgtggagaaagtcctgttcctcaggacactgaagggaggagtgaggaagagaggacagagctggacgtctcctcctatttctccctccccaagtcactctgaggggaagaacactgctgcctgctccctgggcctgccgcatacaaggttagagccctgggtctggggcatccttagcctgaaatttgttgacatggggcaggagagcaggagggaacattgagggttttgactcttcgggctctaaaaggattactcaggatctgggagttccgtatgaaacaaaggagctgaaagaatttgattgccattgctaaaaaatatagaggattt

SEQ ID NO: 158 - DNA, 648 bp, Homo sapiens
  misc_feature (381)..(381): n is a, c, g or t.
  misc_feature (529)..(529): n is a, c, g or t.
  misc_feature (579)..(579): n is a, c, g or t.
  misc_feature (592)..(592): n is a, c, g or t.
  misc_feature (600)..(600): n is a, c, g or t.
  misc_feature (632)..(632): n is a, c, g or t.
  misc_feature (642)..(642): n is a, c, g or t.
ccttgtttgacttttaatggaataatgtcattgccaggcatggactcaaacaaagtaggcacttggttaatatgtattgaatgaaagaaatgagcaggtaggcttttaggaagtggatcttttgactgactcccaaatgctggtcattgcatttctagaacaaaggccacattttagaaacaactggggagtctttttcatggacacatgcccagccccattagagcatcctggcagggtgtccagccgtgtatgttttgaagctcctgtggttcagacacaacctgttacacaactaccaccttgttatctctgtggtcctggcctgtgctgatgctgtgatattttcaccctgaaatgaagagtcatcccaacatcaanggtcagtaaaaccaattcctgtccttaaaaatggattcattattatttgaatttcaaacaacagaccaaccatagctcaatgtttctcaagagtatcctgtggagcacagtgcggtgaacgcccagaagaaaagcagtctgtggtcangtggggttctgtgccatttgctgccaactttcctggcaaacagtggattncagcaaaattgtnctgggtcngttctgagtgataaaaccattaaccaggggtnccaaaggacnggcctt

SEQ ID NO: 159 - DNA, 433 bp, Homo sapiens
  misc_feature (433)..(433): n is a, c, g or t.
agcagcctgccaaaaatattattagaaagctttgttgccgctacataactttaaatctctccttcctcagaaaaagcacccataaaactcagattgatttatgaacagtagcataagggctaccgccagcgtacctgccctgttgccgcctgagaagtgggggcttcttggagaactctttcagatccccggggaaagtggcagagtctaccgaaaccatttatagagaagtatccagactgaagttctcagttccaggaactagggagtacccattggttgatcaccacagtgactctccaacagttcaccctcaagagcgtgacagagtgatcctgttttctgaaccaaaattcaccatgcctgcctgaaagaaacaacattcaaaactggacaccatcctgggaaatgcagaatatatggtggctttggn

SEQ ID NO: 160 - DNA, 3773 bp, Homo sapiens
ccgtcccggggcggacgggcgcgggcgggaggatggagctgaactccctgctgatcctgctggaggcggccgagtacctggagcgcagggatcgagaggccgagcacggctacgcctcggtgctgcccttcgacggcgacttcgccagggagaaaacaaaggcggccggcctggtgcgcaaggccccgaacaacaggtcttcacacaacgagctagaaaagcacagacgagccaaactcaggctgtaccttgagcagctcaagcaactggtgcccctgggccccgacagcacccgccacaccacgctgagcctcctgaagcgggccaaggtgcacatcaagaaactggaggagcaggaccgccgggcactgagcatcaaggagcagctgcagcaggagcatcgtttcctgaagcggcgcctggagcagctgtcggtgcagagcgtggagcgcgtgcgcacagatagcacgggctctgctgtctccacggacgactcagagcaagaagtggacatagagggcatggagtttggccctggtgagctggacagtgttggcagcagcagtgacgcggacgaccactacagcctgcagagtggcaccggcggcgacagtggcttcgggccccactgccggcggctgggccgccccgccctctcgtaggcccgtgccctctgctccttggcctgcctgcccgccagccacgcgtgtcagccctccagttctccttcagttgacgccagcctctccacaggcccactgctgtgccattctggaagctccagctgctgctgggctgcctggcactgcccgcttgccggtcagggcctgccgagctgcctgccccttccagctgggcagagtcccctgcaaggaggcagggcccagcttccacatccggagccctggtcagcatagccgcccacggtctgttctcagattcctaatcattccagaagtattaaacgtcattgctgcaaacctcggcaggtgccgtgtgaggggcttaatgaccaccacagggagctcagaccccaaccctggatcccaggagaaaggagtggaccgaggaaggaaggaaggcaaggctgtctgtccatccgtccgtctgtccacctacctgtcagtccacataggctcctggcgtggacaaggggtctgtgaagggcgggaactgggtgagcacctggggcaggtgggtggttaaggtccttcccacttcgcaggtgtcagaacctagggctgggctctcggggccaggcaggccagcccagcccacgccgagctgggcagcgtctgctctggtaggactgtcagacgcacacgcgcacgcacctagacacacccactcatgtacatgctcacacatgcagacacacctgggcgtcccgaggtcacatgttctggggatgatggccttcaggggtcatctggcaaacagcccctgggctgtgcctggatccccctctagctcctgctcacccacgcccacccagtagtcctgcctgtctgcacaggagaggggcttctcttcctggctggggctggggtgaactggaggctggttaagttgcagccgctgggtcctcgggggcttactcatctcccttttttaaacaaaaagcaaaaaagtaaaatgctgcactgcccagcagcccggttagggctcctggagccaccttaggaaagggcttctcatgagctctgctgcggcagcttcagctggcagagaggctttcccagaaaaaaaaaaaaaaccatttttaaaaagaagaaagcctaaagactctcggcctagggacgtccgtgtgtgccgcctctgtttcctgtaccagatttttgtattctattttcctagctgttgttgcgtccttgtttgctgaggggtgggagccacccagcgtctcagggacctgtccctccgtcacgtcgtcaaagtgtgccttgtgtcttgtgtcaggccttgcccttcccaccagcatgtccctcgtggctcagggtgccccaggcctgcccagctagtgctgtcctcccatctcctgtgggcagcccctcccggcagccagggcttcctggaggcgatgcagccaggcccctgtgggtggcacggaggggctgtgacctggtccccagtgttgccctccccagtggctggcaggggcctgcttgctcactagagagatggattctcacctgtcacctgactcgagccccctgcttcctggcctaggcgagggttccaggtttcagacactggcagccaatgaagactgtgctcgctgggtggtgcaggcctggcaccaggaggcttgcacccgcctttccttcctgacgtcctctgtccttggggctggcccatagcagtgcctgccgtgcctctggtacatctgtagccaattcccatatcatggggaaaattcgtgtctattttcagtcgtacgcatagacgccccaggatggggggcccactgtggcggaagggggtccctggaaacaactctggcacagaacctgccctgcaggctgtagggggcatggtgcctggagctgaggggcatccgaacgcgttgcgggtggttgtgaggaggcctgtctgcatctccttccggccccactggggtccaggggtgcccagaaaggagcttcccctgcctgcctgagtctgtccccccaggcttcatttcaaacaccgtggcacctccgagcaaggcgggccgtgtgtaaaagcttgcttccccagccagcactgcagggccctgaggtggtcgtgtccctgccctcaattcttgaagcaccagctccctgccccaccctccagtgcctgaggcagctaggggcttctgctctcatctctgaccagcagaatccacccggtgaccagtggtggcccctcagcccaccctcccggcagctcagcctgtggctcttgaggccgtggttcccacgtggactgggaggcagtctcagccacccggggtgctgttcagctgcccctccctgccatcagcaggtgggtgaggggttgcccactgggtgggggcccgtgctaggagtcaccacatgctccaacctcccactgctccctgtcaggggcccaggctgccatcactggaggctgcagggaccaagaggccatcaccgtgtctatagagagcagacagaagcagaacagagcccggggctcctgagcctctgcgtgtgccctcccagcccacaccagtgctctcggccactgagcacccagactcaggcttgggttccccagccttattggaaggcagctcccgcataccaggataacccccgcaaaccacatagcagacccccgccatcctcgcagagtgggagaggctgcagcaaggctttgcctctgcagaccccatcttagtggcacggtgcttgggcctgtgtccccgggtggtggaaccctgtaccggtctgtggccctagggtccctgctctgtctgccccggcccgtgctgtccgctgggtgaggcaggctcccccgtgccctgcctccctctgtcagggaacctgggaccccctccccactgcctgcacagaggaccctgaccctcggccagcagggtggccccaggtccatgttgggcactagggcaggttccgtgccagagtcgggggccacacgagggcctggtgccggtgaggggggcgtgcgctagagggggaaaggggcccccggccacctgtccaccgtgtgggccgtgctgtgtccttatgtcattgtaatataaatacagatttttatatctc

SEQ ID NO: 161 - DNA, 3091 bp, Homo sapiens
actcagtgttcgcgggagcgccgcacctacaccagccaacccagatcccgaggtccgacagcgcccggcccagatccccacgcctgccaggagcaagccgagagccagccggccggcgcactccgactccgagcagtctctgtccttcgacccgagccccgcgccctttccgggacccctgccccgcgggcagcgctgccaacctgccggccatggagaccccgtcccagcggcgcgccacccgcagcggggcgcaggccagctccactccgctgtcgcccacccgcatcacccggctgcaggagaaggaggacctgcaggagctcaatgatcgcttggcggtctacatcgaccgtgtgcgctcgctggaaacggagaacgcagggctgcgccttcgcatcaccgagtctgaagaggtggtcagccgcgaggtgtccggcatcaaggccgcctacgaggccgagctcggggatgcccgcaagacccttgactcagtagccaaggagcgcgcccgcctgcagctggagctgagcaaagtgcgtgaggagtttaaggagctgaaagcgcgcaataccaagaaggagggtgacctgatagctgctcaggctcggctgaaggacctggaggctctgctgaactccaaggaggccgcactgagcactgctctcagtgagaagcgcacgctggagggcgagctgcatgatctgcggggccaggtggccaagcttgaggcagccctaggtgaggccaagaagcaacttcaggatgagatgctgcggcgggtggatgctgagaacaggctgcagaccatgaaggaggaactggacttccagaagaacatctacagtgaggagctgcgtgagaccaagcgccgtcatgagacccgactggtggagattgacaatgggaagcagcgtgagtttgagagccggctggcggatgcgctgcaggaactgcgggcccagcatgaggaccaggtggagcagtataagaaggagctggagaagacttattctgccaagctggacaatgccaggcagtctgctgagaggaacagcaacctggtgggggctgcccacgaggagctgcagcagtcgcgcatccgcatcgacagcctctctgcccagctcagccagctccagaagcagctggcagccaaggaggcgaagcttcgagacctggaggactcactggcccgtgagcgggacaccagccggcggctgctggcggaaaaggagcgggagatggccgagatgcgggcaaggatgcagcagcagctggacgagtaccaggagcttctggacatcaagctggccctggacatggagatccacgcctaccgcaagctcttggagggcgaggaggagaggctacgcctgtcccccagccctacctcgcagcgcagccgtggccgtgcttcctctcactcatcccagacacagggtgggggcagcgtcaccaaaaagcgcaaactggagtccactgagagccgcagcagcttctcacagcacgcacgcactagcgggcgcgtggccgtggaggaggtggatgaggagggcaagtttgtccggctgcgcaacaagtccaatgaggaccagtccatgggcaattggcagatcaagcgccagaatggagatgatcccttgctgacttaccggttcccaccaaagttcaccctgaaggctgggcaggtggtgacgatctgggctgcaggagctggggccacccacagcccccctaccgacctggtgtggaaggcacagaacacctggggctgcgggaacagcctgcgtacggctctcatcaactccactggggaaggctcccactgcagcagctcgggggaccccgctgagtacaacctgcgctcgcgcaccgtgctgtgcgggacctgcgggcagcctgccgacaaggcatctgccagcggctcaggagcccaggtgggcggacccatctcctctggctcttctgcctccagtgtcacggtcactcgcagctaccgcagtgtggggggcagtgggggtggcagcttcggggacaatctggtcacccgctcctacctcctgggcaactccagcccccgaacccagagcccccagaactgcagcatcatgtaatctgggacctgccaggcaggggtgggggtggaggcttcctgcgtcctcctcacctcatgcccaccccctgccctgcacgtcatgggagggggcttgaagccaaagaaaaataaccctttggtttttttcttctgtatttttttttctaagagaagttattttctacagtggttttatactgaaggaaaaacacaagcaaaaaaaaaaaaaagcatctatctcatctatctcaatcctaatttctcctcccttccttttccctgcttccaggaaactccacatctgccttaaaaccaaagagggcttcctctagaagccaagggaaaggggtgcttttatagaggctagcttctgcttttctgccctggctgctgcccccaccccggggaccctgtgacatggtgcctgagaggcaggcatagaggcttctccgccagcctcctctggacggcaggctcactgccaggccagcctccgagagggagagagagagagagaggacagcttgagccgggcccctgggcttggcctgctgtgattccactacacctggctgaggttcctctgcctgccccgcccccagtccccacccctgcccccagccccggggtgagtccattctcccaggtaccagctgcgcttgcttttctgtattttatttagacaagagatgggaatgaggtgggaggtggaagaagggagaagaaaggtgagtttgagctgccttccctagctttagaccctgggtgggctctgtgcagtcactggaggttgaagccaagtggggtgctgggaggagggagagggaggtcactggaaaggggagagcctgctggcacccaccgtggaggaggaaggcaagagggggtggaggggtgtggcagtggttttggcaaacgctaaagagcccttgcctccccatttcccatctgcaccccttctctcctccccaaatcaatacactagttgtttct

SEQ ID NO: 162 - DNA, 440 bp, Homo sapiens
  misc_feature (146)..(146): n is a, c, g or t.
  misc_feature (262)..(262): n is a, c, g or t.
tacatcaacaacaaaaaggcattttattttattatttttattttttttgagacggtgtttcatttttgtctcgggtctttttgtcttatccggtgcaggggaaacactggttttaggaaacatctcagattgctgttgcctggtgncggccccttggacccccacattctgctgtggtctgtgggacttcaggttacttggggctaaagtgctagagtctatccctgaagtcagaggggccttgctggcccacggagcgtcntgcttccccttcgcagatggcagggatttggactgcgccgggaaagcagacttgggcttcgggtttacagaaactagagaggggaggcacatcttttcccagcaacgctgcgggggcatccggtacgtcgacttctaagcaaggacttgtttcgacagtttttatgaacgtcaggatt

SEQ ID NO: 163 - DNA, 3365 bp, Homo sapiens
ctggtccgtccaggctccttcccatcctcacacccgcgcctttctccctgcggccccggctcgctgctccagctgcccagctcttcccccgcccggccgcaccataaagcgcccggccgctgccgcggagcccagcagccagctccccagcaccgcacggcggggacgcgagcgcgcccccgacggcagcccggacgccgagcacgggtcacctgcggcgccggcccgggcgccgaccgaggttcaacgcacggcccggggacccccaggcggggccaacgccgccgtcgcccccggcctcgcggggagcaggaagagccaacatgctggccccgcgcggagccgccgtcctcctgctgcacctggtcctgcagcggtggctagcggcaggcgcccaggccaccccccaggtctttgaccttctcccatcttccagtcagaggctaaacccaggcgctctgctgccagtcctgacagaccccgccctgaatgatctctatgtgatttccaccttcaagctgcagactaaaagttcagccaccatcttcggtctttactcttcaactgacaacagtaaatattttgaatttactgtgatgggacgcttaaacaaagccatcctccgttacctgaagaacgatgggaaggtgcatttggtggttttcaacaacctgcagctggcagacggaaggcggcacaggatcctcctgaggctgagcaatttgcagcgaggggccggctccctagagctctacctggactgcatccaggtggattccgttcacaatctccccagggcctttgctggcccctcccagaaacctgagaccattgaattgaggactttccagaggaagccacaggacttcttggaagagctgaagctggtggtgagaggctcactgttccaggtggccagcctgcaagactgcttcctgcagcagagtgagccactggctgccacaggcacaggggactttaaccggcagttcttgggtcaaatgacacaattaaaccaactcctgggagaggtgaaggaccttctgagacagcaggttaaggaaacatcatttttgcgaaacaccatagctgaatgccaggcttgcggtcctctcaagtttcagtctccgaccccaagcacggtggtgcccccggctccccctgcaccgccaacacgcccacctcgtcggtgtgactccaacccatgtttccgaggtgtccaatgtaccgacagtagagatggcttccagtgtgggccctgccccgagggctacacaggaaacgggatcacctgtattgatgttgatgagtgcaaataccatccctgctacccgggcgtgcactgcataaatttgtctcctggcttcagatgtgacgcctgcccagtgggcttcacagggcccatggtgcagggtgttgggatcagttttgccaagtcaaacaagcaggtctgcactgacattgatgagtgtcgaaatggagcgtgcgttcccaactcgatctgcgttaatactttgggatcttaccgctgtgggccttgtaagccggggtatactggtgatcagataaggggatgcaaagcggaaagaaactgcagaaacccagagctgaacccttgcagtgtgaatgcccagtgcattgaagagaggcagggggatgtgacatgtgtgtgtggagtcggttgggctggagatggctatatctgtggaaaggatgtggacatcgacagttaccccgacgaagaactgccatgctctgccaggaactgtaaaaaggacaactgcaaatatgtgccaaattctggccaagaagatgcagacagagatggcattggcgacgcttgtgacgaggatgctgacggagatgggatcctgaatgagcaggataactgtgtcctgattcataatgtggaccaaaggaacagcgataaagatatctttggggatgcctgtgataactgcctgagtgtcttaaataacgaccagaaagacaccgatggggatggaagaggagatgcctgtgatgatgacatggatggagatggaataaaaaacattctggacaactgcccaaaatttcccaatcgtgaccaacgggacaaggatggtgatggtgtgggggatgcctgtgacagttgtcctgatgtcagcaaccctaaccagtctgatgtggataatgatctggttggggactcctgtgacaccaatcaggacagtgatggagatgggcaccaggacagcacagacaactgccccaccgtcattaacagtgcccagctggacaccgataaggatggaattggtgacgagtgtgatgatgatgatgacaatgatggtatcccagacctggtgccccctggaccagacaactgccggctggtccccaacccagcccaggaggatagcaacagcgacggagtgggagacatctgtgagtctgactttgaccaggaccaggtcatcgatcggatcgacgtctgcccagagaacgcagaggtcaccctgaccgacttcagggcttaccagaccgtggtcctggatcctgaaggggatgcccagatcgatcccaactgggtggtcctgaaccagggcatggagattgtacagaccatgaacagtgatcctggcctggcagtggggtacacagcttttaatggagttgacttcgaagggaccttccatgtgaatacccagacagatgatgactatgcaggctttatctttggctaccaagatagctccagcttctacgtggtcatgtggaagcagacggagcagacatattggcaagccaccccattccgagcagttgcagaacctggcattcagctcaaggctgtgaagtctaagacaggtccaggggagcatctccggaactccctgtggcacacgggggacaccagtgaccaggtcaggctgctgtggaaggactccaggaatgtgggctggaaggacaaggtgtcctaccgctggttcctacagcacaggccccaggtgggctacatcagggtacgattttatgaaggctctgagttggtggctgactctggcgtcaccatagacaccacaatgcgtggaggccgacttggcgttttctgcttctctcaagaaaacatcatctggtccaacctcaagtatcgctgcaatgacaccatccctgaggacttccaagagtttcaaacccagaatttcgaccgcttcgataattaaaccaaggaagcaatctgtaactgcttttcggaacactaaaaccatatatattttaacttcaattttctttagcttttaccaacccaaatatatcaaaacgttttatgtgaatgtggcaataaaggagaagagatcatttttaaaaaaaaaaaaaaa

SEQ ID NO: 164 - DNA, 4489 bp, Homo sapiens
agcttcgccagctgagcaaggcgaaagccaaggcgcagagggccgggcagcggcgcgaagaggccgcgctgtgccaccagctgggggagctcctggccggccatggccgctacgccgaggctctggagcagcactggcaggagctgcagcttcgggagcgcgctgacgaccctctgggctgtgccgtggcccaccgcaagatcggagagcgcctggccgagatggaggactacccggctgccttgcagcaccagcaccagtacctggagctggcacattccctgcgcaaccacacggagctgcagagggcctgggccaccatcggccgcacccacctggacatctatgaccactgccagtcgagggatgctttgctgcaggcacaggctgcctttgagaagagcttggctattgtggatgaggagctggaggggacactggcccagggagagctgaatgagatgaggacccgcctctatctcaacctgggcctcacctttgagagcctgcagcagacagccctgtgcaacgattacttcaggaagagcatcttccttgcggagcagaaccacctttacgaggacctattccgcgcccgctacaacctgggcaccatccactggcgcgcgggccagcactcccaggctatgcgctgcttggagggtgcccgggagtgtgcgcacaccatgaggaagcggttcatggagagcgagtgctgcgtggttattgcacaggtcctccaagacctgggagactttttggctgccaagcgagccctgaagaaggcctacaggctgggctcccagaagcctgtgcagagggcagccatctgtcagaacctccagcatgtgctggcagtggtccggctgcagcaacagctggaagaggctgagggcagagaccctcagggtgccatggtcatctgtgagcagctaggggacctcttctccaaggcaggagactttcccagggcagctgaggcttaccagaagcagctgcgttttgctgagctgctggacagaccgggtgctgagcgggccatcatccacgtgtccctggccaccacactgggagacatgaaggaccaccatggggccgtgcgccactatgaggaggaactgaggctgcgcagcggcaacgtgctggaggaggccaagacctggctgaacattgcactgtcccgcgaggaggccggcgatgcctacgagctgctggccccgtgcttccagaaagcgctcagctgtgcccagcaggcccagcgtccccagctgcagaggcaggtcttgcagcatctccataccgtgcagctgaggctgcagccccaggaggcccctgagaccgaaaccagactgcgggagctcagtgtagctgaagatgaagatgaggaggaggaggcggaggaggcggcagccacagcggagagcgaagccctggaggccggcgaggtggagctctcagagggcgaggacgacaccgatggcctgaccccgcagctggaggaggacgaggagcttcagggccacctgggccggcggaaggggagcaagtggaaccggcgaaacgacatgggggagaccctgctgcaccgagcctgcatcgagggccagctgcgccgcgtccaggaccttgtgaggcagggccacccccttaaccctcgggactactgtggctggacacctctgcacgaggcctgcaactacgggcatctagaaattgtccgcttcctgctggaccacggggccgcagtggacgacccaggtggccagggctgcgaaggcatcacccccctccacgatgccctcaactgtggccacttcgaggtggctgagctgctgcttgaacggggggcgtccgtcaccctccgcactcgaaagggcctcagcccgctggagacgctgcagcagtgggtgaagctgtaccgcagggacctggacctggagacgcggcagaaggccagggccatggagatgctgctccaggcggctgcctcgggccaagatccccacagctcccaggccttccacaccccaagcagccttctgtttgaccccgagacctctcctcctttgagcccctgcccagaacccccctctaatagcactagactcccagaggcctctcaggcccatgtcagggtctccccagggcaggcggcaccagccatggccaggcctcggaggagcaggcatgggccagccagcagcagcagcagctcagaaggcgaggacagcgcaggccccgcacggccgtcccagaagaggcctcggtgctcggccacagcacaacgggtggcagcctggacgcctggccccgccagcaacagggaagcagccacagccagcaccagccgggcagcctaccaggcagccatccggggtgtgggcagtgctcagagccggctggggcctggcccaccgcggggccacagcaaagcccttgccccccaggcagcgctcatcccggaggaggagtgcctggccggggactggctggagctggacatgcccctgacccgcagccgccggccccgcccccggggcactggagacaaccgcaggcccagtagtacctctgggtcggacagtgaggagagcaggccccgtgcccgagccaagcaggtccgcctgacctgcatgcagagttgcagtgcgccagttaacgcagggcccagcagcctggcttcagaacctccagggagccccagcacccccagggtctcagagcccagtggggacagctctgcggcaggccagcccttgggtccggccccgccccctcccatccgggttcgagttcaagttcaggatcatctcttcctcatccctgtcccacacagcagtgacacccactctgtggcctggctggccgagcaggcggcccagcgctactaccagacctgcgggctgctgcccaggctcaccctacggaaagagggggccctgctggccccacaggacctcatccctgatgtgctgcagagcaatgacgaggtgttggctgaggtgacttcgtgggacctgcccccgttgactgaccgctaccgcagggcctgccagagcctggggcaaggggagcaccaacaggtgctgcaggccgtggagctccagggcttgggcctctcgttcagcgcctgctccctggccctggaccaggcccagcttacacccctgctgcgggccctcaagctgcacacagcactccgggagctgcgcctggcagggaaccggctgggggacaagtgtgtggctgagctggtggctgccctgggcaccatgcccagcctggccctccttgacctctcctccaatcacctgggtcccgaaggcctgcgccagcttgccatggggctcccaggccaagccaccttgcagagtttggaggagctggacttaagcatgaaccccctgggggacggctgtggccagtccctggcctccctcctgcacgcctgccccttactcagcaccctgcgcctgcaggcgtgtggcttcggccccagcttctttctgagccaccagacagcactgggtagtgctttccaagatgctgagcacctgaagaccctgtccctgtcctacaacgccctgggagcccctgccctggccaggaccctgcagagcctgcccgccggcaccctcctgcacttagagctcagctccgtggcagccggcaagggtgattcggacctcatggagcctgtattccgatacctggccaaggaaggctgtgctctagcccacctgaccctgtctgcaaaccacctgggggacaaggctgttagagacctgtgcagatgtctctctctgtgcccctcactcatctcactggatctgtctgccaaccctgagatcagctgtgccagcttggaagagctcctgtccaccctccaaaagcggccccaaggccttagcttccttggcctgtcaggctgcgccgtccagggtcccctgggcctgggcctgtgggacaagatagccgcgcagctccgggaactgcagctgtgcagcagacgcctctgcgctgaggacagggacgccctgcgccagctgcagcccagtcggccgggccccggcgagtgcacgctggaccacggctccaagctcttctttcggcgcctctgaccctggcgctgcctttccccaccctcaccgaagcccctaataaatgaagctgctggccgggcgcggtggctcacgcctgtaatcccaacactttgggaggcccaggcgggcggatcacgaggtcaggagatcgagaccatcctggctaacatggtgaaaccccgtctctactaaaaataccaaaaattagccgggcgtggtggtggaagcctgtagtcccagctactccggaggctgaggcaggagaatggcgtgaacccgggaggcggagcttgcagtgagccgagatcgcaccactgcactccagcctgggcgacagaccgagactccgtctcaaaaaaaaaaaaaaaaaaaaaaaaaaaaaaaaa

SEQ ID NO: 165 - DNA, 2690 bp, Homo sapiens
ataaaaacccagaaagccccagaaacaaagacttcacggacaaagtcccttggaaccagagagaagccgggatggaaactccaaacaccacagaggactatgacacgaccacagagtttgactatggggatgcaactccgtgccagaaggtgaacgagagggcctttggggcccaactgctgccccctctgtactccttggtatttgtcattggcctggttggaaacatcctggtggtcctggtccttgtgcaatacaagaggctaaaaaacatgaccagcatctacctcctgaacctggccatttctgacctgctcttcctgttcacgcttcccttctggatcgactacaagttgaaggatgactgggtttttggtgatgccatgtgtaagatcctctctgggttttattacacaggcttgtacagcgagatctttttcatcatcctgctgacgattgacaggtacctggccatcgtccacgccgtgtttgccttgcgggcacggaccgtcacttttggtgtcatcaccagcatcatcatttgggccctggccatcttggcttccatgccaggcttatacttttccaagacccaatgggaattcactcaccacacctgcagccttcactttcctcacgaaagcctacgagagtggaagctgtttcaggctctgaaactgaacctctttgggctggtattgcctttgttggtcatgatcatctgctacacagggattataaagattctgctaagacgaccaaatgagaagaaatccaaagctgtccgtttgatttttgtcatcatgatcatcttttttctcttttggaccccctacaatttgactatacttatttctgttttccaagacttcctgttcacccatgagtgtgagcagagcagacatttggacctggctgtgcaagtgacggaggtgatcgcctacacgcactgctgtgtcaacccagtgatctacgccttcgttggtgagaggttccggaagtacctgcggcagttgttccacaggcgtgtggctgtgcacctggttaaatggctccccttcctctccgtggacaggctggagagggtcagctccacatctccctccacaggggagcatgaactctctgctgggttctgactcagaccataggaggccaacccaaaataagcaggcgtgacctgccaggcacactgagccagcagcctggctctcccagccaggttctgactcttggcacagcatggagtcacagccacttgggatagagagggaatgtaatggtggcctggggcttctgaggcttctggggcttcagtcttttccatgaacttctcccctggtagaaagaagatgaatgagcaaaaccaaatattccagagactgggactaagtgtaccagagaagggcttggactcaagcaagatttcagatttgtgaccattagcatttgtcaacaaagtcacccacttcccactattgcttgcacaaaccaattaaacccagtagtggtgactgtgggctccattcaaagtgagctcctaagccatgggagacactgatgtatgaggaatttctgttcttccatcacctccccccccccgccaccctcccactgccaaagaacttggaaatagtgatttccacagtgactccactctgagtcccagagccaatcagtagccagcatctgcctccccttcactcccaccgcaggatttgggctcttggaatcctggggaacatagaactcatgacggaagagttgagacctaacgagaaatagaaatggggaactactgctggcagtggaactaagaaagcccttaggaagaatttttatatccactaaaatcaaacaattcagggagtgggctaagcacgggccatatgaataacatggtgtgcttcttaaaatagccataaaggggagggactcatcatttccatttacccttcttttctgactatttttcagaatctctcttcttttcaagttgggtgatatgttggtagattctaatggctttattgcagcgattaataacaggcaaaaggaagcagggttggtttcccttctttttgttcttcatctaagccttctggttttatgggtcagagttccgactgccatcttggacttgtcagcaaaaaaaaaaaataataataataataaggcctgctgtgtaagctgacagtatttgtagctgatagggggttgggaggaaagtgtctactaggagggtggggtgagattctgtgttgatgtaggaggccgagaaggcccttaactcaaagtagcttatttatccaaaatgttctggatgcatcatctccaaccaaggaccccttatttatcatgcctttgttctcttttccctcagatgtatatttctttaaaaataattttcctaataacaaaacttatttctaaaacagcttaaaaattcaaagaaaaaccccaaacactgacattacctacacttccactacccaaagacaaaatgtgcccactgtgtgcttttgagtgtattttcttttagtttgttttttgttgggtgcatatttatgataataacaatgatggacttcaattgtactcactgttctattgttggttttaattagcagcaagttgtgatcactttcccaggtgaataaatcatttcaaagcattaaaaaaaaaaaaaa

SEQ ID NO: 166 - DNA, 2498 bp, Homo sapiens
gctgagcgccggaggagcgtaggcagggcagcgctggcgccagtggcgacaggagccgcgcgaccggcaaaaatacacgggaggccgtcgccgaaaagagtccgcggtcctctctcgtaaacacactctcctccaccggcgcctccccctccgctctgcgcgccgcccggctgggcgcccgaggccgctccgactgctatgtgaccgcgaggctgcgggaggaaggggacagggaagaagaggctctcccgcgggagcccttgaggaccaagtttgcggccacttctgcaggcgtcccttcttagctctcgcccgcccctttctgcagcctaggcggcccgggttctcttctcttcctcgcgcgcccagccgcctcggttcccggcgaccatggtgacgatggaggagctgcgggagatggactgcagtgtgctcaaaaggctgatgaaccgggacgagaatggcggcggcgcgggcggcagcggcagccacggcaccctggggctgccgagcggcggcaagtgcctgctgctggactgcagaccgttcctggcgcacagcgcgggctacatcctaggttcggtcaacgtgcgctgtaacaccatcgtgcggcggcgggctaagggctccgtgagcctggagcagatcctgcccgccgaggaggaggtacgcgcccgcttgcgctccggcctctactcggcggtcatcgtctacgacgagcgcagcccgcgcgccgagagcctccgcgaggacagcaccgtgtcgctggtggtgcaggcgctgcgccgcaacgccgagcgcaccgacatctgcctgctcaaaggcggctatgagaggttttcctccgagtacccagaattctgttctaaaaccaaggccctggcagccatcccacccccggttccccccagtgccacagagcccttggacctgggctgcagctcctgtgggaccccactacacgaccaggggggtcctgtggagatccttcccttcctctacctcggcagtgcctaccatgctgcccggagagacatgctggacgccctgggcatcacggctctgttgaatgtctcctcggactgcccaaaccactttgaaggacactatcagtacaagtgcatcccagtggaagataaccacaaggccgacatcagctcctggttcatggaagccatagagtacatcgatgccgtgaaggactgccgtgggcgcgtgctggtgcactgccaggcgggcatctcgcggtcggccaccatctgcctggcctacctgatgatgaagaaacgggtgaggctggaggaggccttcgagttcgttaagcagcgccgcagcatcatctcgcccaacttcagcttcatggggcagctgctgcagttcgagtcccaggtgctggccacgtcctgtgctgcggaggctgctagcccctcgggacccctgcgggagcggggcaagacccccgccacccccacctcgcagttcgtcttcagctttccggtctccgtgggcgtgcactcggcccccagcagcctgccctacctgcacagccccatcaccacctctcccagctgttagagccgccctgggggccccagaaccagagctggctcccagcaagggtaggacgggccgcatgcgggcagaaagttgggactgagcagctgggagcaggcgaccgagctccttccccatcatttctccttggccaacgacgaggccagccagaatggcaataaggactccgaatacataataaaagcaaacagaacactccaacttagagcaataacggctgccgcagcagccagggaagaccttggtttggtttatgtgtcagtttcacttttccgatagaaatttcttacctcatttttttaagcagtaaggcttgaagtgatgaaacccacagatcctagcaaatgtgcccaaccagctttactaaagggggaggaagggagggcaaagggatgagaagacaagtttcccagaagtgcctggttctgtgtacttgtccctttgttgtcgttgttgtagttaaaggaatttcattttttaaaagaaatcttcgaaggtgtggttttcatttctcagtcaccaacagatgaataattatgcttaataataaagtatttattaagactttcttcagagtatgaaagtacaaaaagtctagttacagtggatttagaatatatttatgttgatgtcaaacagctgagcaccgtagcatgcagatgtcaaggcagttaggaagtaaatggtgtcttgtagatatgtgcaaggtagcatgatgagcaacttgagtttgttgccactgagaagcaggcgggttgggtgggaggaggaagaaagggaagaattaggtttgaattgctttttaaaaaaaaaagaaaagaaaaagacagcatctcactatgttgccaaggctcatcttgagaagcaggcgggttgggtgggaggaggaagaaagggaagaattaggtttgaattgctttttt

SEQ ID NO: 167 - DNA, 1734 bp, Homo sapiens
ggacctctccagaatccggattgctgaatcttccctgttgcctagaagggctccaaaccacctcttgacaatgggaaactgggtggttaaccactggttttcagttttgtttctggttgtttggttagggctgaatgttttcctgtttgtggatgccttcctgaaatatgagaaggccgacaaatactactacacaagaaaaatccttgggtcaacattggcctgtgcccgagcgtctgctctctgcttgaattttaacagcacgctgatcctgcttcctgtgtgtcgcaatctgctgtccttcctgaggggcacctgctcattttgcagccgcacactgagaaagcaattggatcacaacctcaccttccacaagctggtggcctatatgatctgcctacatacagctattcacatcattgcacacctgtttaactttgactgctatagcagaagccgacaggccacagatggctcccttgcctccattctctccagcctatctcatgatgagaaaaaggggggttcttggctaaatcccatccagtcccgaaacacgacagtggagtatgtgacattcaccagcattgctggtctcactggagtgatcatgacaatagccttgattctcatggtaacttcagctactgagttcatccggaggagttattttgaagtcttctggtatactcaccacctttttatcttctatatccttggcttagggattcacggcattggtggaattgtccggggtcaaacagaggagagcatgaatgagagtcatcctcgcaagtgtgcagagtcttttgagatgtgggatgatcgtgactcccactgtaggcgccctaagtttgaagggcatccccctgagtcttggaagtggatccttgcaccggtcattctttatatctgtgaaaggatcctccggttttaccgctcccagcagaaggttgtgattaccaaggttgttatgcacccatccaaagttttggaattgcagatgaacaagcgtggcttcagcatggaagtggggcagtatatctttgttaattgcccctcaatctctctcctggaatggcatccttttactttgacctctgctccagaggaagatttcttctccattcatatccgagcagcaggggactggacagaaaatctcataagggctttcgaacaacaatattcaccaattcccaggattgaagtggatggtccctttggcacagccagtgaggatgttttccagtatgaagtggctgtgctggttggagcaggaattggggtcaccccctttgcttctatcttgaaatccatctggtacaaattccagtgtgcagaccacaacctcaaaacaaaaaaggttggtcatgcagcattaaactttgacaaggccactgacatcgtgacaggtctgaaacagaaaacctcctttgggagaccaatgtgggacaatgagttttctacaatagctacctcccaccccaagtctgtagtgggagttttcttatgtggccctcggactttggcaaagagcctgcgcaaatgctgtcaccgatattccagtctggatcctagaaaggttcaattctacttcaacaaagaaaatttttgagttataggaataaggacggtaatctgcattttgtctctttgtatcttcagtaatttacttggtctcgtcaggtttgagcagtcactttaggataagaatgtgcctctcaagccttg

SEQ ID NO: 168 - DNA, 368 bp, Homo sapiens
  misc_feature (256)..(256): n is a, c, g or t.
catttctttataaaacagtcatctcactagcagctctctcccctagagtaggggaagggggtggaggaggttgggcacctccaaaggagaaaaaggatagcagggaagggcccaaggttacctcctgaggttcttctgggcctgtttcaacaatgtgtcaaagtcaagagaatcaaatttgctctttacaggtgctggggtcaaagtcttccccggttgggagtcaagatccaggaatagctccctcttgcagganctgcccttcgggcccccaaagcagaggatccaaaggggctgctcatctgccctgcccgcagcttgtggggccactctcaatgggccttgcaaatgcctccctcaggcatagg

SEQ ID NO: 169 - DNA, 387 bp, Homo sapiens
  misc_feature (222)..(222): n is a, c, g or t.
  misc_feature (376)..(376): n is a, c, g or t.
  misc_feature (387)..(387): n is a, c, g or t.
tctttttatttaggaaaataatcatgctaaaagcaagttgtactttatatagattttcaaacaaaagattgattgtgctttttgaataaaaaagatagggtatcttccaacctcactgacttaaaccttgtgggaatacagcacttctaaactaaaaacacacgtcaaaaaggaaaaattaaataatcccagtggggatgctccaaaaatcgtctttagganggttttagggattgggctaattctgctattatcttattgggctgcgggcaaaaaaagggacacaggggctgctgtcttaaaatttctcccaactcccctccggagttcaggcaggggcaacacttcaggattttgaaggaactctggcggcacnggggggcattn

SEQ ID NO: 170 - DNA, 405 bp, Homo sapiens
  misc_feature (8)..(8): n is a, c, g or t.
  misc_feature (384)..(384): n is a, c, g or t.
  misc_feature (399)..(399): n is a, c, g or t.
ttcaaganatgaaggtagttttaaatttcttcatcaggctgtcagtgttcactggctaagttcggacgtctatccaggcttttttctaatataatgccattagttacagcctgggaagccaggtaactaaactaattagaattacaggtaaattaataaggacttcctgagtaagcactagaggccctcctataagaaataccatacattgtttgccgtcgattttggctgctgaggatgatttagcttcccactgccttttctctctagtaccccaagatgtttttttcaatgagctaaggccgctctacaactctaagttaactccagacaagtcagggtgttgccatctacagtggatttctagctgggatctgactccgncacttcatttacggngtaaaa

SEQ ID NO: 171 - DNA, 418 bp, Homo sapiens
  misc_feature (179)..(179): n is a, c, g or t.
  misc_feature (181)..(181): n is a, c, g or t.
  misc_feature (185)..(185): n is a, c, g or t.
  misc_feature (201)..(201): n is a, c, g or t.
  misc_feature (204)..(204): n is a, c, g or t.
  misc_feature (208)..(208): n is a, c, g or t.
  misc_feature (249)..(249): n is a, c, g or t.
  misc_feature (315)..(315): n is a, c, g or t.
  misc_feature (322)..(322): n is a, c, g or t.
  misc_feature (341)..(341): n is a, c, g or t.
  misc_feature (402)..(402): n is a, c, g or t.
  misc_feature (411)..(411): n is a, c, g or t.
ttttttttttttcatgtacaaaattaatgtttatttaaaaagcacttttcttatcccctgataaaagcactcaaatatggtttcacaatatagaaatgattgacttatgatttttagtttattgatgatgccctgaggcataacaatcccaggagctgcaggaaccacagatcctattncngtgnaaggggatactttccnccnattnttcagaaaagttccattgaactccggggtgggatgaaacantggtgcaagctccgggaagccgcaatcagggagagggctgggtgaaagagccaatgccccgggcanttctagncaccttcagctttaaaatntccactgggaactctgccttgacacagcctgatctaacacaaagttgtggttttttaggantttgacagntccaggg

SEQ ID NO: 172 - DNA, 888 bp, Homo sapiens
gtctgcgcggagtctgagcggcgctcgtcccgtcccaaggccgacgccagcacgccgtcatggcccccgcagcggcgacggggggcagcaccctgcccagtggcttctcggtcttcaccaccttgcccgacttgctcttcatctttgagtttgacgcagcctaccactgcaccgctgccctcttttacctcagcgcctcagtcctggaggccctggccaccatcacgatgcaagacggcttcacctacaggcactaccatgaaaacattgctgccgtggtgttctcctacatagccactctgctctacgtggtccatgcggtgttctctttaatcagatggaagtcttcataaagccgcagtagaacttgagctgaaaacccagatggtgttaactggccgccccactttccggcataactttttagaaaacagaaatgcccttgatggtggaaaaaagaaaacaaccacccccccactgcccaaaaaaaaaagccctgccctgttgctcgtgggtgctgtgtttactctcccgtgtgccttcgcgtccgggttgggagcttgctgtgtctaacctccaactgctgtgctgtctgctagggtcacctcctgtttgtgaaaggggaccttcttgttcgggggtgggaagtggccaccgtgacctgagaaggaaagaaagatcctctgctgacccctggagcagctctcgagaactacctgttggtattgtccacaagctctcccgagcgccccatcttgtgccatgttttaagtcttcatggatgttctgcatgtcatgcggactaaaactcacccaacagatctttccagaggtccatggtggaagacgataaccctgtgaaatactttataaaatgtcttaatgttc

SEQ ID NO: 173 - DNA, 475 bp, Homo sapiens
  misc_feature (444)..(444): n is a, c, g or t.
  misc_feature (453)..(453): n is a, c, g or t.
ttttttttttttataatttaattttcataacagtatttttatttgtgaaatttttttacaatttgctttttttttggtatgttctacatttttttccatgtactaagtatcgtgggaagttccaacctcatacttatgctgcttttctacttgctaatattggatgcttcttgccaggctccttaaattgtgctgtaacctgggaagaaaccttcctactctccacaaaccctgaataatcctgagagtttaaacctcacctaattattctctatcatttagaaactagaggggtggaggactgagagagggacagtataaaattcgaaaccagtgatgcattggctgaaaaacactgacatgaattgtgagagcaaagaaaccacagctggttttgcaggtgcagtccaggtgggccttggcagctgatgttgaattgtacgnttgtagccntatattttctgggctacagctg

SEQ ID NO: 174 - DNA, 482 bp, Homo sapiens
  misc_feature (393)..(393): n is a, c, g or t.
  misc_feature (440)..(440): n is a, c, g or t.
ttttttttttttttggtgtctaatacttttacttcccagcagcataataccactttggtcaggttgaaccactgcacaattttgcagctctttcagaaaaataatgaaaacaattggaaagacatgatgtacatgcaaatggtgagaaaatgatactattgtccaatcctttcccgtaaatgtaaaatatccttagttcatctccaaactgtgtatttattataagcccttacatcagggattttgtttctttcagtttttgtagcaccaaatagacacagcggctaacaagaaataaatctgaaaagtcactgaaatatttatcacatgtcaggaaattttctggtctgtacctttaaccatgttcctgggcttcacatattcttcttaagngtaagctataacataaggttgagttcccacccgtgtttggctaccgntgtggtttgtttacctggataatactttgttaatatcctttg

SEQ ID NO: 175 - DNA, 5343 bp, Homo sapiens
cctcctggagaagatgacgtccagcgacaaggacttcaggttcatggccaccagcgacctgatgtcggagttgcagaaggactccatccagctggacgaggacagcgagcgcaaggtggtgaagatgctgctccggctcctggaggacaagaacggtgaggtgcagaacctggctgtcaagtggctgggtgtcccgctgggcgccttccacgccagcctcctgcactgtctgctgccacagctgagcagcccgcgcctggcggtgcgcaagcgggcggtcggagcgcttggccacctggcggccgcctgcagcaccgacctcttcgtcgagctcgctgaccacctactggaccggctgcccggcccgcgggtgcccaccagcccgactgccatccgcaccctgatccaatgtttgggcagcgtcggccgccaggccggccaccgcctcggggctcacctggaccgcctggtgcccctggtggaggatttctgcaacctggatgatgatgagctccgggagtcctgcctccaggcttttgaggccttcttgaggaagtgccccaaggaaatgggtcctcacgtgcccaacgtgaccagcctctgcctccaatacataaaacacgaccccaactacaactacgacagtgatgaggatgaggagcagatggagacagaggatagtgaattcagtgagcaagagagtgaagacgagtacagcgatgacgatgacatgagctggaaggtgcgccgggcagctgccaagtgcatcgcagccttgatcagctcgcggcctgacctgctgcccgatttccactgcaccctggcacctgtgctcatccgccgcttcaaagaacgcgaggagaacgtcaaggctgacgtcttcactgcttacatcgtgctgctgcggcaaacacagcccccgaagggatggctggaggccatggaggaacccacccagaccggcagcaacctccatatgctacgtggacaggtgccccttgtggtcaaggccctgcagcggcagcttaaagatcggagcgtcagagcccgccagggatgcttcagcctcctcaccgagctggcgggtgtcctcccaggcagcctggccgagcatatgcctgtgctggtatcaggcatcatcttctcgctggccgaccgctccagctcctccaccatccggatggatgccctggccttcttgcaggggctgctgggcaccgaaccagctgaggccttccacccacacttgcctatcctcctgccacctgtgatggcctgtgtggctgactctttctacaagattgcagccgaggccctggtggtgctgcaggagctggtgcgggccctgtggccgctgcacaggcctcggatgctggatcctgagccatatgttggagagatgtctgctgtcaccctggcgcgacttcgtgccactgacctggaccaggaggtgaaggagcgggccatttcctgcatgggccaccttgtaggccacctgggtgaccggcttggggatgacctggagcccacgttactgctcctcctggaccgcctgcggaatgagatcacccggctgcccgccatcaaggcgcttacgctggtggccgtatccccactacagcttgacctacagcccatcctggccgaggcactgcacattctggcctcattcctgcggaagaaccagcgggctttgcgactggccacactggcagccctggacgccctggcccagagccagggcctcagcctcccaccgtctgccgtgcaggccgtgctggctgagctgcctgccctggtcaacgagagcgacatgcatgtggcccagctggctgtggacttccttgccacagtgacccaggcccagccagcctctttggtggaggtcagtggccctgtgctctcagagctgctgcggctgctgcgttcgcccctgttgccagccggggttctggcagctgctgaaggcttcctgcaggccctggtagggacccgtcccccgtgtgtggactatgccaaactcatcagcctgctcactgcgcctgtttatgagcaggctgtggatggtgggcctggcctgcacaagcaggtgttccactcattggcccggtgtgtggcagccctctcagctgcctgtccccaagaggcggcaagcacagccagtcgcctggtctgcgatgccaggtcgccccactccagcacgggggtcaaggtcctggcattcttgtcgctggctgaggtgggtcaggtggctgggccaggccaccagcgggagctgaaggcggtgctcctggaagctttggggtcacccagtgaggatgtgagggctgcagcctcgtatgcactgggccgtgtgggtgctggcagcctgcccgacttcctgcccttcctgctggagcagatcgaggctgagccccgacgacagtacctgctgctgcactcactcagggaggccctgggggccgcccagcctgacagcctgaagccctacgccgaggacatctgggccttgctgttccagcgctgcgagggtgctgaggagggcacccggggggtggtggccgagtgcattgggaagctggtccttgtgaacccttcgttccttctgccccgcttgcggaagcagcttgctgcaggtcggccacacacccggagcaccgtcatcacagcggtcaagttccttatctcggaccagccccatcccattgaccccctcctgaagagcttcatcgctgtgcacaacaagccctcgctagtccgggacctgctggatgacatcctgcccctcctctaccaggagacaaagatccggcgggacctcatccgagaggtggagatggggccctttaaacatacagtggacgatgggctggacgtgcggaaggcggcctttgaatgcatgtattcactgcttgagagctgcctgggccagctggatatctgtgagttcctgaaccatgtggaggacgggctgaaggaccactacgacatccggatgctgaccttcatcatggttgcccggctggccaccctgtgtcctgcacctgtcctgcagagggtggaccgactcattgagccactaagggccacctgcactgccaaggtcaaagctggttctgtgaagcaggagtttgaaaagcaagatgaactgaagcgctctgcaatgagggcagtggctgccctgctgaccatccccgaggtggggaaaagccccatcatggccgacttctcttcccaaatcagatccaaccctgaacttgctgccctctttgaaagcatccagaaggattccgcttcagcccccagcacagactcaatggagctcagctagtcccctcagcaccaaggtgggccctcgcttaagagaaaggagcccacccaagtccgaggcctccccatcccaccatcgcaggtctctacttttgcccttccaccatctcactgggggccctgtcgctcctggtcagggcttacagtgccttctccagggacccaactcaaaggcccccagcccaagctgtgaggctgccaacagttgggccccttccttaactcaggacagtcatccaaagaaatagggtgaggaagttttccagtgacttcacactgtacccctccatagtctgtctggttccttcagagggtgtctctgcctcacaaactagtagtatttagaaataggctgtgctgtcagctgtaaaagatcaggaggcagcagacaccactctggtttcttcactgcattcagcaatgcctgaagttagtgctcaggccgggcatctcaaaagaaaagatacttgagttattcacattttaaaattcaaaacggttcatttttaagtggcagtgatgaatcagaaatttggaagatgatacgggtttcttttttccagggaggaggaatgggttgggtagggaactggacaggcttggacctcatgtttcatttctaatttcaaaatacttattagcaaattgggcaacaatgggcatcttccatgccaccacccaggcataaccagttggtttgtttccttctgaggaaggtttcaaatgtgtctagtgttcagtattgaggacaaagaaatacaagtggcaggcccaagtattttctgtgatatcccaggttaataaagattagattctaagttacttctttcctctgcacgactcgtctccaattgttaatcgaatcgcctgaacccaggaggcagaagttgcagggagccaagatcaagccactgcactccagccggggtgacagaatgagtctcaaaaacaaaatcccaaaaatgaccagtttgcattataaatatttatgactaggttttgaacaggagacaatctgtaagattcctgtctagactagaagtagaaaagctttattatacccagcgcagcatttctgctaagttgaccaggatggttacagaaaaacatcctgtaagcatttctgtctcataagtaccacatcccatatccctcatgacctatatactacagaagatgcctgtaatcccagtactttgggaggctgaagcaggattgcttgagctcaggagttcgggagcctaggcaacatggctagaccacctctacaaaaaaacttcaaaaactacccaggtttggaggtgtgcatctgtagtcccagctacttggaaggctgaggtgggaagatcacctgagcctggggaggtcaaggctgtagtcagtgtgccactgcactcccagcctgggtgagagcaagaccccgtctccaaaaaaaatcaggaccacgtgtcactaaattctgagtaccagtcaagaggctcaattgtcaccagttaggtccccgccttggcaaactgctgtaacattatacctgaagcagcagctggtgggagggttataggagactgaaagtgcttttccagttaaccgtggtggattacctggaagagcaatttgtacatcatcctgttctttttggacagaagttacaggatgcaatttaggcatcccgtaagaatctgtgtaagaaattcatctggatatttccatgcatattttctcaattctcacaagcatcacatggaataacttgtcacctaactttacaaaagcaaggctaagaatgactacttgtggcttgggagccacaagcttcttcaagtgtctcagaacctacctggtgtgagggccaagtctgtacccctcatacccagcctcaactggagatgactaaggctagtctgtgcacttgaggccacattcccctgttcaaggactgagtgtcctttacaaatcccctccaaatgggagattccaaaggggcttaagcaaaagaacaatctctgtggcaaa

SEQ ID NO: 176 - DNA, 4325 bp, Homo sapiens
gccctttctgtgcggcgcccgggcgcaacgcaaacatggcggcgggtggcacccgtcggtgaggcggtgccgggcgggggttgtcgggtgtcatgggcggtggcgacggcaccgcccccgcgtctccctgagcgggacggcagggggggcttctgcgctgagccgggcgatggacgacagcggcgagctgggtggtctggagaccatggagaccctcacggagctgggcgacgagctgaccctgggagacatcgacgagatgctgcaatttgtcagtaatcaagtgggagagttccctgacttgttttcagaacagctgtgtagctcctttcctggcagtggtggtagtggtagcagcagcggcagcagtggcagcagcagcagcagcagcaatggcaggggcagcagcagcggagctgtggacccttcagtgcaacggtcattcacccaggtcacattaccttccttctctccctcggcggcctccccacaggctccaactctgcaagtcaaggtttctcccacctcagttcccaccacacccagggcaactcctattcttcagccccgcccccagccccagcctcaacctcaaactcagctgcaacaacagacggtaatgatcacgccaacattcagcaccactccgcagacgaggatcatccagcagcctttgatataccagaatgcagctactagctttcaagtccttcagcctcaagtccaaagcctggtgacatcctcccaggtacagccggtcaccattcagcagcaggtgcagacagtacaggcccagcgggtgctgacacaaacggccaatggcacgctgcagacccttgccccggctacggtgcagacagttgctgcgccacaggtgcagcaggtcccggtcctggtccagcctcagatcatcaagacagattcccttgttttgaccacactgaagacagatggcagccctgttatggctgcggtccagaacccggccctcaccgccctcaccacccctatccagacggctgcccttcaagtaccaaccctggtgggcagcagtgggaccattctgaccacaatgcctgtaatgatggggcaagagaaagtgcccattaagcaggtacctgggggagtcaagcagcttgagccccccaaagaaggagaaaggcggacaacccataatatcattgagaaacgatatcgctcctccatcaatgacaaaatcatcgaattgaaagacctggtcatggggacagacgccaagatgcacaagtctggcgttctgaggaaggccattgattacatcaaatacttgcagcaggtcaatcataaactgcgccaggagaacatggtgctgaagctggcaaatcaaaagaacaagcttctaaagggcatcgacctaggcagtctggtggacaatgaggtggacctgaagatcgaggactttaatcagaatgtccttctgatgtcccccccagcctctgactcagggtcccaggctggcttctctccctactccattgactctgagccaggaagccctctattggatgatgcaaaggtcaaagatgagccagactctcctcctgtggcgctgggcatggtagaccgctcacggattcttctgtgtgtcctcaccttcctgtgcctctcctttaaccccctgacttccctgctgcagtggggaggggcccacgactctgaccagcacccacactcaggctctggccgcagtgtcctgtcattcgagtcaggttctgggggctggtttgactggatgatgcctactcttctcttatggctggtaaatggtgtgattgtcctgagcgtctttgtgaagctgctggttcatggggagccagtgatccggccacactcgcgctcctcggtcaccttctggaggcaccggaaacaggcagatctggatctcgccagaggagattttgcagctgctgccggcaacctacaaacctgcctggcagttttgggccgggcactgcccacctcccgcctggacctggcctgcagcctctcctggaacgtgatccgctacagcctgcagaagctacgcctggtgcgctggctgctcaagaaagtcttccagtgccggcgggccacgccagccactgaggcaggctttgaagacgaagctaagaccagcgcccgggatgcggctctggcctatcaccggctgcaccagctgcacatcacagggaagcttcctgcaggatccgcctgttccgatgtacacatggcgttgtgtgccgtgaacctggctgaatgtgcagaggagaagatcccaccgagcacactggttgagatccatctgactgctgccatggggctcaagacccggtgtggaggcaagctgggcttcctggccagctacttcctcagccgagcccagagcctgtgtggccccgagcacagtgctgttcctgactccctgcgctggctctgccaccccctgggccagaagtttttcatggagcggagctggtctgtgaagtcagctgccaaggagagtctatactgtgcccagaggaacccagctgaccccattgcgcaggtccaccaggccttctgcaagaacctgctggagcgagctatagagtccttggtgaaacctcaggccaagaagaaggctggagaccaggaagaagagagctgtgaattctccagtgctctggagtacttgaaattacttcattcttttgtggactctgtgggggttatgagccccccactctccaggagctccgtgctcaagtccgccctgggtccagacatcatctgtcggtggtggacgtctgcaatcactgtggccatcagctggctccagggagacgatgcagctgtgcgctctcattttaccaaagtggaacgcatccccaaggccctggaagtgacagagagccccctggtgaaggccatcttccatgcctgcagagccatgcatgcctcactccctgggaaagcagatgggcagcagagttccttctgccattgcgagagggccagtggccacctatggagcagcctcaacgtcagtggggccacctctgaccctgccctcaaccacgtggtccagctgctcacctgtgacctgctactgtcgctacggacagcgctctggcaaaaacaggccagtgccagccaggctgtgggggagacctaccacgcgtcaggcgctgaactggcgggcttccaacgggacctgggcagcctgcgcaggctggcacacagcttccgcccagcataccgcaaggtgttcctgcatgaagccaccgtgcgcctgatggcaggagccagccccacccgcacccaccagctgctggaacacagcctgcggcggcgcaccacgcagagcaccaagcacggagaggtggatgcctggcccggccagcgagagcgggccaccgccatcctgctggcctgccgccacctgcccctctccttcctctcctccccgggccagcgggcagtgctgctggccgaagctgcccgcaccctggagaaggtgggcgaccggcgctcctgcaacgactgccagcagatgattgttaagctgggtggtggcactgccattgccgcctcctgaccaccaggctcagcccacccctccacctctctctcgatttctctctctccccctcagcatcttcccgctgagagtggtggggaagagccttgtcttcttagctgtcacctgccgaggcttctgggccactcaggccagtgcacccctgggcagagccccttaaagctgctgtcactagatgcccatggtccagggcctggtgggcgtgagaggataggtggcagggcagaaactgggcagccctgacttgatagcagcagggggagctcccaagctgccaagcccctgcctccagccttcctgagtttctctctcctgaaccctactctctcctttttgcttcctcagtttttatcaggctttctctgggggacagcagtctctgagcaccagggagcagttgccctcaggcctgtgcccagcatgccctcccctttttatacgaatgttttctaccagtgtgcttgggtttgccatgatgcgaggctgagttgctgtagcgtcttgattctctccctgggtctgcgttccctcccctgggcctgactgagcctgctcattgtttttccctttattacacaggacagccaggggaggaggggggcccagccctgggaggctggtgggaggcagggggcaggcctgcggatgcatgaaataatgttggcattattttttaattttttaaaaaataaatggtatcttatttaaaaaaaaaaaaaaaaaaaaa

SEQ ID NO: 177 - DNA, 444 bp, Homo sapiens
  misc_feature (312)..(312): n is a, c, g or t.
  misc_feature (424)..(424): n is a, c, g or t.
  misc_feature (441)..(441): n is a, c, g or t.
ttttttttcctaagatattgttctgtattacaaaagaagaaattagactcaattgccctattataaatttgctaaaaatacatatatatatatattttatctgaacagaaaaatagactactctgagatgcgtggacattctatgacatagtcgcgcatcagatacttctagagccagaaaaatggcaacagaaaatgcagaggtaactcttatttctgggtgtagccagggactgggtttgggttgcctgggctgagtgacatgaaaggcatttgggatgctgtcctataaggcagtgatagggtgagggnaacatcagctcggggctgggaagcttttccattgtccctgcccggggtcttcagggggagccccttcttcctcctgcccactttggcagcttaccaggaaaaagtccctttncccaaaggaggcatgtnccg

SEQ ID NO: 178 - DNA, 354 bp, Homo sapiens
  misc_feature (346)..(346): n is a, c, g or t.
ttttttttcattttttaaatggctttattaaaggctacaagtataaaatatgactaagttacaagtcgtcagtaagaatttattacttttgaaaatgttaattaaagaaagggagacgcaaagaaagggaggctcttcctgaaatccacacaggggggtgcggctcagacgggtgacagacccccgctgttcccagtagggcagcacccccaaacccagggggccaagggaggggctcccagatgaaacagaggctggttgctgatttcttgggggaacttttgtaaaaatggaagacactgaatccttgaggctggaatcccagggtgcaggaggactggggggngaggtggg

SEQ ID NO: 179 - DNA, 450 bp, Homo sapiens
  misc_feature (322)..(322): n is a, c, g or t.
  misc_feature (357)..(357): n is a, c, g or t.
  misc_feature (398)..(398): n is a, c, g or t.
  misc_feature (420)..(420): n is a, c, g or t.
  misc_feature (436)..(436): n is a, c, g or t.
gtaggcagccgcggctaccctctgcaggcccggcccgcacaacagaggctgtatgcgagaggaatggaaatgagcctcaggccctgccgaagagccccatccccttccccgcgcgggctgaggaatgctggccagccggaaaggaaccctcgctgggaacgccgctctcgcgcctctgaaaccccattgagaagaaccctttgatgcaattaaagcgcatttcattgcaggcctggggaggagggaacgaccggcaagcttttttctgtctcggacgtgtgtatgcacctttgtggggccgggttacttaggagaccagggngggaactttgagctccctcttttcgcagacgtttntgttaacattcaagaaaaagcgttaccccttaaacagattnggttttcaccaggggttggaantcaattttggacaagntccaggtttacctt

SEQ ID NO: 180 - DNA, 388 bp, Homo sapiens
  misc_feature (350)..(350): n is a, c, g or t.
  misc_feature (377)..(377): n is a, c, g or t.
aaagctcaagagctaaagtcagagagtggagcccagattcagagactggccttgctgactctgaagaccctgtttggtccccaagacttcattccgtcaccttcacttctatcccagatcctctcatttgtttccacgtatcttctgtgattttagtttgcgcaactaaacctattctgagtttttatttaaaaagataccctctctgatttaagaagaggcataggagacacaatcctattgggtgcctactgggtcacagtttcacaattcaatactggcaacggcatcgtaattcaaaggcattgctgggcttggggtaattcactttcattaacaggtccccgccnggcataaaatacaagggcaatgggggnattaaaccaat

SEQ ID NO: 181 - DNA, 423 bp, Homo sapiens
  misc_feature (279)..(279): n is a, c, g or t.
  misc_feature (372)..(372): n is a, c, g or t.
  misc_feature (382)..(382): n is a, c, g or t.
ttcttaattcaggaagagttttctttttagaaaaaaatactttaatcaggctttcaacaacattatccatgggtcagtggctgatactattattcctatttttcaggaggtggctggtctctccttgatttttgtttttgtttttgtttttgttttaaggttttagactgattgctatttgggcattaaaggagccataataaataatccatgcccactttaggttatctggtagatccacagaaattttaaatagggagggagagttagggtaaggancgacactatcaatgaccattttaggaactggggggggaaaaaatccccacaacaaccctggaaatgtcttctgtcattacagtttcaaaaacnaggggggggnaaaaaaggagggccactacttttacccgggggtcccctagt

SEQ ID NO: 182 - DNA, 2346 bp, Homo sapiens
ccttcgcgccctgggccatctccctcccacctccctccgcggagcagccagacagcgagggccccggccgggggcaggggggacgccccgtccggggcacccccccggctctgagccgcccgcggggccggcctcggcccggagcggaggaaggagtcgccgaggagcagcctgaggccccagagtctgagacgagccgccgccgcccccgccactgcggggaggagggggaggaggagcgggaggagggacgagctggtcgggagaagaggaaaaaaacttttgagacttttccgttgccgctgggagccggaggcgcggggacctcttggcgcgacgctgccccgcgaggaggcaggacttggggaccccagaccgcctccctttgccgccggggacgcttgctccctccctgccccctacacggcgtccctcaggcgcccccattccggaccagccctcgggagtcgccgacccggcctcccgcaaagacttttccccagacctcgggcgcaccccctgcacgccgccttcatccccggcctgtctcctgagcccccgcgcatcctagaccctttctcctccaggagacggatctctctccgacctgccacagatcccctattcaagaccacccaccttctggtaccagatcgcgcccatctaggttatttccgtgggatactgagacacccccggtccaagcctcccctccaccactgcgcccttctccctgaggacctcagctttccctcgaggccctcctaccttttgccgggagacccccagcccctgcaggggcggggcctccccaccacaccagccctgttcgcgctctcggcagtgccggggggcgccgcctcccccatgccgccctccgggctgcggctgctgccgctgctgctaccgctgctgtggctactggtgctgacgcctggccggccggccgcgggactatccacctgcaagactatcgacatggagctggtgaagcggaagcgcatcgaggccatccgcggccagatcctgtccaagctgcggctcgccagccccccgagccagggggaggtgccgcccggcccgctgcccgaggccgtgctcgccctgtacaacagcacccgcgaccgggtggccggggagagtgcagaaccggagcccgagcctgaggccgactactacgccaaggaggtcacccgcgtgctaatggtggaaacccacaacgaaatctatgacaagttcaagcagagtacacacagcatatatatgttcttcaacacatcagagctccgagaagcggtacctgaacccgtgttgctctcccgggcagagctgcgtctgctgaggctcaagttaaaagtggagcagcacgtggagctgtaccagaaatacagcaacaattcctggcgatacctcagcaaccggctgctggcacccagcgactcgccagagtggttatcttttgatgtcaccggagttgtgcggcagtggttgagccgtggaggggaaattgagggctttcgccttagcgcccactgctcctgtgacagcagggataacacactgcaagtggacatcaacgggttcactaccggccgccgaggtgacctggccaccattcatggcatgaaccggcctttcctgcttctcatggccaccccgctggagagggcccagcatctgcaaagctcccggcaccgccgagccctggacaccaactattgcttcagctccacggagaagaactgctgcgtgcggcagctgtacattgacttccgcaaggacctcggctggaagtggatccacgagcccaagggctaccatgccaacttctgcctcgggccctgcccctacatttggagcctggacacgcagtacagcaaggtcctggccctgtacaaccagcataacccgggcgcctcggcggcgccgtgctgcgtgccgcaggcgctggagccgctgcccatcgtgtactacgtgggccgcaagcccaaggtggagcagctgtccaacatgatcgtgcgctcctgcaagtgcagctgaggtcccgccccgccccgccccgccccggcaggcccggccccaccccgccccgcccccgctgccttgcccatgggggctgtatttaaggacacccgtgccccaagcccacctggggccccattaaagatggagagaggactgcggatctctgtgtcattgggcgcctgcctggggtctccatccctgacgttcccccactcccactccctctctctccctctctgcctcctcctgcctgtctgcactattcctttgcccggcatcaaggcacaggggaccagtggggaacactactgtagttagatc

SEQ ID NO: 183 - DNA, 7522 bp, Homo sapiens
gcggccgggccgggccgcgggagcaggcggaggcggaggcggcgggggcaggaggatgtcgcagccgccgctgctccccgcctcggcggagactcggaagttcacccgggcgctgagtaagccgggcacggcggccgagctgcggcagagcgtgtctgaggtggtgcgcggctccgtgctcctggcaaagccaaagctaattgagccactcgactatgaaaatgtcatcgtccagaagaagactcagatcctgaacgactgtttacgggagatgctgctcttcccttacgatgactttcagacggccatcctgagacgacagggtcgatacatatgctcaacagtgcctgcgaaggcggaagaggaagcacagagcttgtttgttacagagtgcatcaaaacctataactctgactggcatcttgtgaactataaatatgaagattactcaggagagtttcgacagcttccgaacaaagtggtcaagttggataaacttccagttcatgtctatgaagttgacgaggaggtcgacaaagatgaggatgctgcctcccttggttcccagaagggtgggatcaccaagcatggctggctgtacaaaggcaacatgaacagtgccatcagcgtgaccatgaggtcatttaagagacgatttttccacctgattcaacttggcgatggatcctataatttgaatttttataaagatgaaaagatctccaaagaaccaaaaggatcaatatttctggattcctgtatgggtgtcgttcagaacaacaaagtcaggcgttttgcttttgagctcaagatgcaggacaaaagtagttatctcttggcagcagacagtgaagtggaaatggaagaatggatcacaattctaaataagatcctccagctcaactttgaagctgcaatgcaagaaaagcgaaatggcgactctcacgaagatgatgaacaaagcaaattggaaggttctggttccggtttagatagctacctgccggaacttgccaagagtgcaagagaagcagaaatcaaactgaaaagtgaaagcagagtcaaacttttttatttggacccagatgcccagaagcttgacttctcatcagctgagccagaagtgaagtcatttgaagagaagtttggaaaaaggatccttgtcaagtgcaatgatttatctttcaatttgcaatgctgtgttgccgaaaatgaagaaggacccactacaaatgttgaacctttctttgttactctatccctgtttgacataaaatacaaccggaagatttctgccgatttccacgtagacctgaaccatttctcagtgaggcaaatgctcgccaccacgtccccggcgctgatgaatggcagtgggcagagcccatctgtcctcaagggcatccttcatgaagccgccatgcagtatccgaagcagggaatattttcagtcacttgtcctcatccagatatatttcttgtggccagaattgaaaaagtccttcaggggagcatcacacattgcgctgagccatatatgaaaagttcagactcttctaaggtggcccagaaggtgctgaagaatgccaagcaggcatgccaaagactaggacagtatagaatgccatttgcttgggcagcaaggacattgtttaaggatgcatctggaaatcttgacaaaaatgccagattttctgccatctacaggcaagacagcaataagctatccaatgatgacatgctcaagttacttgcagactttcggaaacctgagaagatggctaagctcccagtgattttaggcaatctagacattacaattgataatgtttcctcagacttccctaattatgttaattcatcatacattcccacaaaacaatttgaaacctgcagtaaaactcccatcacgtttgaagtggaggaatttgtgccctgcataccaaaacacactcagccttacaccatctacaccaatcacctttacgtttatcctaagtacttgaaatacgacagtcagaagtcttttgccaaggctagaaatattgcgatttgcattgaattcaaagattcagatgaggaagactctcagccccttaagtgcatttatggcagacctggtgggccagttttcacaagaagcgcctttgctgcagttttacaccatcaccaaaacccagaattttatgatgagattaaaatagagttgcccactcagctgcatgaaaagcaccacctgttgctcacattcttccatgtcagctgtgacaactcaagtaaaggaagcacgaagaagagggatgtcgttgaaacccaagttggctactcctggcttcccctcctgaaagacggaagggtggtgacaagcgagcagcacatcccggtctcggcgaaccttccttcgggctatcttggctaccaggagcttgggatgggcaggcattatggtccggaaattaaatgggtagatggaggcaagccactgctgaaaatttccactcatctggtttctacagtgtatactcaggatcagcatttacataattttttccagtactgtcagaaaaccgaatctggagcccaagccttaggaaacgaacttgtaaagtaccttaagagtctgcatgcgatggaaggccacgtgatgatcgccttcttgcccactatcctaaaccagctgttccgagtcctcaccagagccacacaggaagaagtcgcggttaacgtgactcgggtcattattcatgtggttgcccagtgccatgaggaaggattggagagccacttgaggtcatatgttaagtacgcgtataaggctgagccatatgttgcctctgaatacaagacagtgcatgaagaactgaccaaatccatgaccacgattctcaagccttctgccgatttcctcaccagcaacaaactactgaagtactcatggtttttctttgatgtactgatcaaatctatggctcagcatttgatagagaactccaaagttaagttgctgcgaaaccagagatttcctgcatcctatcatcatgcagtggaaaccgttgtaaatatgctgatgccacacatcactcagaagtttcgagataatccagaggcatctaagaacgcgaatcatagccttgctgtcttcatcaagagatgtttcaccttcatggacaggggctttgtcttcaagcagatcaacaactacattagctgttttgctcctggagacccaaagaccctctttgaatacaagtttgaatttctccgtgtagtgtgcaaccatgaacattatattccgttgaacttaccaatgccatttggaaaaggcaggattcaaagataccaagacctccagcttgactactcattaacagatgagttctgcagaaaccacttcttggtgggactgttactgagggaggtggggacagccctccaggagttccgggaggtccgtctgatcgccatcagtgtgctcaagaacctgctgataaagcattcttttgatgacagatatgcttcaaggagccatcaggcaaggatagccaccctctacctgcctctgtttggtctgctgattgaaaacgtccagcggatcaatgtgagggatgtgtcacccttccctgtgaacgcgggcatgactgtgaaggatgaatccctggctctaccagctgtgaatccgctggtgacgccgcagaagggaagcaccctggacaacagcctgcacaaggacctgctgggcgccatctccggcattgcttctccatatacaacctcaactccaaacatcaacagtgtgagaaatgctgattcgagaggatctctcataagcacagattcgggtaacagccttccagaaaggaatagtgagaagagcaattccctggataagcaccaacaaagtagcacattgggaaattccgtggttcgctgtgataaacttgaccagtctgagattaagagcctactgatgtgtttcctctacatcttaaagagcatgtctgatgatgctttgtttacatattggaacaaggcttcaacatctgaacttatggatttttttacaatatctgaagtctgcctgcaccagttccagtacatggggaagcgatacatagccagaacaggaatgatgcatgccagattgcagcagctgggcagcctggataactctctcacttttaaccacagctatggccactcggacgcagatgttctgcaccagtcattacttgaagccaacattgctactgaggtttgcctgacagctctggacacgctttctctatttacattggcgtttaagaaccagctcctggccgaccatggacataatcctctcatgaaaaaagtttttgatgtctacctgtgttttcttcaaaaacatcagtctgaaacggctttaaaaaatgtcttcactgccttaaggtccttaatttataagtttccctcaacattctatgaagggagagcggacatgtgtgcggctctgtgttacgagattctcaagtgctgtaactccaagctgagctccatcaggacggaggcctcccagctgctctacttcctgatgaggaacaactttgattacactggaaagaagtcctttgtccggacacatttgcaagtcatcatatctgtcagccagctgatagcagacgttgttggcattgggggaaccagattccagcagtccctgtccatcatcaacaactgtgccaacagtgaccggcttattaagcacaccagcttctcctctgatgtgaaggacttaaccaaaaggatacgcacggtgctaatggccaccgcccagatgaaggagcatgagaacgacccagagatgctggtggacctccagtacagcctggccaaatcctatgccagcacgcccgagctcaggaagacgtggctcgacagcatggccaggatccatgtcaaaaatggcgatctctcagaggcagcaatgtgctatgtccacgtaacagccctagtggcagaatatctcacacggaaagaagcagtccagtgggagccgccccttctcccccacagccatagcgcctgcctgaggaggagccggggaggcgtgtttagacaaggatgcaccgccttcagggtcattaccccaaacatcgacgaggaggcctccatgatggaagacgtggggatgcaggatgtccatttcaacgaggatgtgctgatggagctccttgagcagtgcgcagatggactctggaaagccgagcgctacgagctcattgccgacatctacaaacttatcatccccatttatgagaagcggagggattttgagaggctggcccatctgtatgacacgctgcaccgggcctacagcaaagtgaccgaggtcatgcactcgggccgcaggcttctggggacctacttccgggtagccttcttcgggcaggcagcgcaataccagtttacagacagtgaaacagatgtggagggattctttgaagatgaagatggaaaggagtatatttacaaggaacccaaactcacaccgctgtcggaaatttctcagagactccttaaactgtactcggataaatttggttctgaaaatgtcaaaatgatacaggattctggcaaggtcaaccctaaggatctggattctaagtatgcctacatccaggtgactcacgtcatccccttctttgacgaaaaagagttgcaagaaaggaaaacagagtttgagagatcccacaacatccgccgcttcatgtttgagatgccatttacgcagaccgggaagaggcagggcggggtggaagagcagtgcaaacggcgcaccatcctgacagccatacactgcttcccttatgtgaagaagcgcatccctgtcatgtaccagcaccacactgacctgaaccccatcgaggtggccattgacgagatgagtaagaaggtggcggagctccggcagctgtgctcctcggccgaggtggacatgatcaaactgcagctcaaactccagggcagcgtgagtgttcaggtcaatgctggcccactagcatatgcgcgagctttcttagatgatacaaacacaaagcgatatcctgacaataaagtgaagctgcttaaggaagttttcaggcaatttgtggaagcttgcggtcaagccttagcggtaaacgaacgtctgattaaagaagaccagctcgagtatcaggaagaaatgaaagccaactacagggaaatggcgaaggagctttctgaaatcatgcatgagcagctgggatgatctgccccctggaggagaagacgagcgtcttaccgaattcccttcacatcttcaacgccatcagtgggactccaacaagcacaatggttcacgggatgaccagctcgtcttcggtcgtgtgattacatctcatggcccgtgtgtggggacttgctttgtcatttgcaaactcaggatgctttccaaagccaatcactggggagaccgagcacagggaggaccaggggaaggggagagaaaggaaataaagaacaacgttatttcttaacagactttctataggagttgtaagaaggtgcacatatttttttaaatctcactggcaatattcaaagttttcattgtgtcttaacaaaggtgtggtagacactcttgagctggacttagattttattcttccttgcagagtagtgttagaatagatggcctacagaaaaaaaaggttctgggatctacatggcagggagggctgcactgacattgatgcctgggggaccttttgcctcgaggctgagctggaaaatcttgaaaatattttttttttcctgtggcacattcaggttgaatacaagaactatttttgtgactagtttttgatgacctaagggaactgaccattgtaatttttgtaccagtgaaccaggagatttagtgcttttatattcatttccttgcatttaagaaaatatgaaagcttaaggaattatgtgagcttaaaactagtcaagcagtttagaaccaaaggcctatattaataaccgcaactatgctgaaaagtacaaagtagtacagtatattgttatgtacatatcattgttaatacagtcctggcattctgtacatatatgtattacatttctacatttttaatactcacatgggcttatgcattaagtttaattgtgataaatttgtgctgttccagtatatgcaatacactttaatgttttattcttgtacataaaaatgtgcaatatggagatgtatacagtctttactatattaggtttataaacagttttaagaatttcatccttttgccaaaatggtggagtatgtaattggtaaatcataaatcctgtggtgaatggtggtgtactttaaagctgtcaccatgttatattttcttttaagacattaatttagtaattttatatttgggaaaataaaggtttttaattttatttaactggaatcactgccctgctgtaattaaacattctgtaccacatctgtattaaaaagacattgctgacc

SEQ ID NO: 184 - DNA, 2253 bp, Homo sapiens
atgaagttccaccagtccactggcaaacactactcttctagctatagacaaggagacatcctgggattttatatgaatcttcctgaagaaacaaagacagtcaagtcattgcctgatacttacaaagataaggccttgataaagtttaagaattatttgtgttttgaggaaaaagactttgtgactaaagcagagaagagcctaaaagagacttcccacagtgagataagattttataaaaatggtgttagtcaaggcgtggcttacaaaaatattttcaaggggctttaccttccagcaatcttaccagaaaacaactgcataatttccatgaacattggactgtgcttcaagtatcctccaaaggatctcgcttactgccctatgagtgacgtgggctgggatgctctggtagagcacactctggctggtgtcttggtgctagaaatggattcaatcactggacaagaaagtccttcaggggcaaacataaggacactgagggtcatcttattctacctgccttctctccttacttggtccctctcccagcctgtgctgactcagccaccttctgcatcagcctccctgggagcctcggtcacactcacctgcaccctgagcagcggctacagtaattataaagtggactggtaccagcagagaccagggaagggcccccggtttgtgatgcaagtgggcactggtgggattgtgggatccaagggggatggcatccctgatcgcttctcagtcttgggctcaggcctgaatcggtacctgaccatcaagaacatccaggaagaggatgagagtgactaccactgtggggcagaccatggcagttccctctcgcagcctgtgctgactcacccaactttcctctcagcatctcctggagcatcagccagactcacctgcaccttgcgcagtggcatcaatcttggtagctacaggatatactggtaccagcagaagccagggagtcctccccggtatctcctgaggtacaaatcagactcagataagcagcagggctctggagtccccagccgcttctctggatccaaagatgcttcgaccaatgcagggattttagtcatctctgggctccatgaaacactccaaagacatttgccaggatcccccacagactggcattcagtgcttggaggacagactcctaggcaagatccctggtcacagtatccagatgactatgactgcaaatctggggaaagtatgaagagagggagagatctgggggaagctcagcttcagctgtgggtagagaagacaggactcaggacaatctccagcatggccggcttccctctcctcctcaccctcctcactcactgtgcagggtcctgggcccagtctgtgctgactcagccaccctcagcgtctgggacccccgggcagagggtcaccatctcttgttctggaagcagctccaacatcggaagtaatactgtaaactggtaccagcagctcccaggaacggcccccaaactcctcatctatagtaataatcagcggccctcaggggtctctgaccgattctctggctccaagtctggcacctcagcctccctggccatcagtgggctccggtccgaggatgaggctgattattactgtgcagcatgggatgacagcctgagtggtcccacagaacacctggatccagggtgtaaagaccagaaagaacactaccgcagatttggacttttggatcaggacttggtaacattgaccctgtttatgacaaccaaaaacaaagcagtgctgtgtctacagtgggaatctgagtcaggaaactgcagcaggaagcagcagaaaaaaggaagagcagctcagtgcaaacagaaggatggggagaccacagggaccaccaagaaggcccagagtgactttttgttttccgctcagggctgtcctcctcacaccccttggatcacacatttaatgaagacggctactgggtcgaattctcaggctgtgatgactcaggaaccctcactgactgtgtccccaggagggacagtcactctcacctatggctccagcactggagcagtcaatgggggtcattatccttactggttccagcagaagcttggccaagcccccaggacactgatttatcatgcaagcaacaaacactcctggactcctgcccggttctcaggctcagtccttgggagcaaagctgcccagacactcttgggtgtgcagcccgagaggtga

SEQ ID NO: 185 - DNA, 1323 bp, Homo sapiens
gtggaggttgctgctatgagagagaaaaaaaaaaacagccacaatagagattctgccttcaaaggttggcttgccacctgaagcagccactgcccagggggtgcaaagaagagacagcagcgcccagcttggaggtgctaactccagaggccagcatcagcaactgggcacagaaaggagccgcctgggcagggaccatggcacggccacatccctggtggctgtgcgttctggggaccctggtggggctctcagctactccagcccccaagagctgcccagagaggcactactgggctcagggaaagctgtgctgccagatgtgtgagccaggaacattcctcgtgaaggactgtgaccagcatagaaaggctgctcagtgtgatccttgcataccgggggtctccttctctcctgaccaccacacccggccccactgtgagagctgtcggcactgtaactctggtcttctcgttcgcaactgcaccatcactgccaatgctgagtgtgcctgtcgcaatggctggcagtgcagggacaaggagtgcaccgagtgtgatcctcttccaaacccttcgctgaccgctcggtcgtctcaggccctgagcccacaccctcagcccacccacttaccttatgtcagtgagatgctggaggccaggacagctgggcacatgcagactctggctgacttcaggcagctgcctgcccggactctctctacccactggccaccccaaagatccctgtgcagctccgattttattcgcatccttgtgatcttctctggaatgttccttgttttcaccctggccggggccctgttcctccatcaacgaaggaaatatagatcaaacaaaggagaaagtcctgtggagcctgcagagccttgtcgttacagctgccccagggaggaggagggcagcaccatccccatccaggaggattaccgaaaaccggagcctgcctgctccccctgagccagcacctgcgggagctgcactacagccctggcctccacccccaccccgccgaccatccaagggagagtgagacctggcagccacaactgcagtcccatcctcttgtcagggccctttcctgtgtacacgtgacagagtgccttttcgagactggcagggacgaggacaaatatggatgaggtggagagtgggaagcaggagcccagccagctgcgcctgcgctgcaggagggcgggggctctggttgtaaaacacacttcctgctgcgaaagacccacatgctacaagacgggcaaaataaagtgacagatgaccaccctgcaaaaaaaaaaaaaaaaaa

SEQ ID NO: 186 - DNA, 4267 bp, Homo sapiens
attcgcctctgggaggtttaggaagcggctccgggtcggtggccccaggacagggaagagcgggcgctatggggagccggacgccagagtcccctctccacgccgtgcagctgcgctggggcccccggcgccgacccccgctgctgccgctgctgttgctgctgctgccgccgccacccagggtcgggggcttcaacttagacgcggaggccccagcagtactctcggggcccccgggctccttcttcggattctcagtggagttttaccggccgggaacagacggggtcagtgtgctggtgggagcacccaaggctaataccagccagccaggagtgctgcagggtggtgctgtctacctctgtccttggggtgccagccccacacagtgcacccccattgaatttgacagcaaaggctctcggctcctggagtcctcactgtccagctcagagggagaggagcctgtggagtacaagtccttgcagtggttcggggcaacagttcgagcccatggctcctccatcttggcatgcgctccactgtacagctggcgcacagagaaggagccactgagcgaccccgtgggcacctgctacctctccacagataacttcacccgaattctggagtatgcaccctgccgctcagatttcagctgggcagcaggacagggttactgccaaggaggcttcagtgccgagttcaccaagactggccgtgtggttttaggtggaccaggaagctatttctggcaaggccagatcctgtctgccactcaggagcagattgcagaatcttattaccccgagtacctgatcaacctggttcaggggcagctgcagactcgccaggccagttccatctatgatgacagctacctaggatactctgtggctgttggtgaattcagtggtgatgacacagaagactttgttgctggtgtgcccaaagggaacctcacttacggctatgtcaccatccttaatggctcagacattcgatccctctacaacttctcaggggaacagatggcctcctactttggctatgcagtggccgccacagacgtcaatggggacgggctggatgacttgctggtgggggcacccctgctcatggatcggacccctgacgggcggcctcaggaggtgggcagggtctacgtctacctgcagcacccagccggcatagagcccacgcccacccttaccctcactggccatgatgagtttggccgatttggcagctccttgacccccctgggggacctggaccaggatggctacaatgatgtggccatcggggctccctttggtggggagacccagcagggagtagtgtttgtatttcctgggggcccaggagggctgggctctaagccttcccaggttctgcagcccctgtgggcagccagccacaccccagacttctttggctctgcccttcgaggaggccgagacctggatggcaatggatatcctgatctgattgtggggtcctttggtgtggacaaggctgtggtatacaggggccgccccatcgtgtccgctagtgcctccctcaccatcttccccgccatgttcaacccagaggagcggagctgcagcttagaggggaaccctgtggcctgcatcaaccttagcttctgcctcaatgcttctggaaaacacgttgctgactccattggtttcacagtggaacttcagctggactggcagaagcagaagggaggggtacggcgggcactgttcctggcctccaggcaggcaaccctgacccagaccctgctcatccagaatggggctcgagaggattgcagagagatgaagatctacctcaggaacgagtcagaatttcgagacaaactctcgccgattcacatcgctctcaacttctccttggacccccaagccccagtggacagccacggcctcaggccagccctacattatcagagcaagagccggatagaggacaaggctcagatcttgctggactgtggagaagacaacatctgtgtgcctgacctgcagctggaagtgtttggggagcagaaccatgtgtacctgggtgacaagaatgccctgaacctcactttccatgcccagaatgtgggtgagggtggcgcctatgaggctgagcttcgggtcaccgcccctccagaggctgagtactcaggactcgtcagacacccagggaacttctccagcctgagctgtgactactttgccgtgaaccagagccgcctgctggtgtgtgacctgggcaaccccatgaaggcaggagccagtctgtggggtggccttcggtttacagtccctcatctccgggacactaagaaaaccatccagtttgacttccagatcctcagcaagaatctcaacaactcgcaaagcgacgtggtttcctttcggctctccgtggaggctcaggcccaggtcaccctgaacggtgtctccaagcctgaggcagtgctattcccagtaagcgactggcatccccgagaccagcctcagaaggaggaggacctgggacctgctgtccaccatgtctatgagctcatcaaccaaggccccagctccattagccagggtgtgctggaactcagctgtccccaggctctggaaggtcagcagctcctatatgtgaccagagttacgggactcaactgcaccaccaatcaccccattaacccaaagggcctggagttggatcccgagggttccctgcaccaccagcaaaaacgggaagctccaagccgcagctctgcttcctcgggacctcagatcctgaaatgcccggaggctgagtgtttcaggctgcgctgtgagctcgggcccctgcaccaacaagagagccaaagtctgcagttgcatttccgagtctgggccaagactttcttgcagcgggagcaccagccatttagcctgcagtgtgaggctgtgtacaaagccctgaagatgccctaccgaatcctgcctcggcagctgccccaaaaagagcgtcaggtggccacagctgtgcaatggaccaaggcagaaggcagctatggcgtcccactgtggatcatcatcctagccatcctgtttggcctcctgctcctaggtctactcatctacatcctctacaagcttggattcttcaaacgctccctcccatatggcaccgccatggaaaaagctcagctcaagcctccagccacctctgatgcctgagtcctcccaatttcagactcccattcctgaagaaccagtccccccaccctcattctactgaaaaggaggggtctgggtacttcttgaaggtgctgacggccagggagaagctcctctccccagcccagagacatacttgaagggccagagccaggggggtgaggagctggggatccctcccccccatgcactgtgaaggacccttgtttacacataccctcttcatggatgggggaactcagatccagggacagaggccccagcctccctgaagcctttgcattttggagagtttcctgaaacaacttggaaagataactaggaaatccattcacagttctttgggccagacatgccacaaggacttcctgtccagctccaacctgcaaagatctgtcctcagccttgccagagatccaaaagaagcccccagctaagaacctggaacttggggagttaagacctggcagctctggacagccccaccctggtgggccaacaaagaacactaactatgcatggtgccccaggaccagctcaggacagatgccacacaaggatagatgctggcccagggcccagagcccagctccaaggggaatcagaactcaaatggggccagatccagcctggggtctggagttgatctggaacccagactcagacattggcacctaatccaggcagatccaggactatatttgggcctgctccagacctgatcctggaggcccagttcaccctgatttaggagaagccaggaatttcccaggaccctgaaggggccatgatggcaacagatctggaacctcagcctggccagacacaggccctccctgttccccagagaaaggggagcccactgtcctgggcctgcagaatttgggttctgcctgccagctgcactgatgctgcccctcatctctctgcccaacccttccctcaccttggcaccagacacccaggacttatttaaactctgttgcaagtgcaataaatctgacccagtgcccccactgaccagaactagaaaaaaaaaaaaaaaaaaa

SEQ ID NO: 187 - DNA, 2488 bp, Homo sapiens
ttttgtccgcctgccgccgccgtcccagatattaatcacggagttccagggagaaggaacttgtgaaatgggggagccggctggggttgccggcaccatggagtcaccttttagcccgggactctttcacaggctggatgaagattgggattctgctctctttgctgaactcggttatttcacagacactgatgagctgcaattggaagcagcaaatgagacgtatgaaaacaattttgataatcttgattttgatttggatttgatgccttgggagtcagacatttgggacatcaacaaccaaatctgtacagttaaagatattaaggcagaacctcagccactttctccagcctcctcaagttattcagtctcgtctcctcggtcagtggactcttattcttcaactcagcatgttcctgaggagttggatttgtcttctagttctcagatgtctcccctttccttatatggtgaaaactctaatagtctctcttcagcggagccactgaaggaagataagcctgtcactggtcctaggaacaagactgaaaatggactgactccaaagaaaaaaattcaggtgaattcaaaaccttcaattcagcccaagcctttattgcttccagcagcacccaagactcaaacaaactccagtgttccagcaaaaaccatcattattcagacagtaccaacgcttatgccattggcaaagcagcaaccaattatcagtttacaacctgcacccactaaaggccagacggttttgctgtctcagcctactgtggtacaacttcaagcacctggagttctgccctctgctcagccagtccttgctgttgctgggggagtcacacagctccctaatcacgtggtgaatgtggtaccagccccttcagcgaatagcccagtgaatggaaaactttccgtgactaaacctgtcctacaaagtaccatgagaaatgtcggttcagatattgctgtgctaaggagacagcaacgtatgataaaaaatcgagaatccgcttgtcagtctcgcaagaagaagaaagaatatatgctagggttagaggcgagattaaaggctgccctctcagaaaacgagcaactgaagaaagaaaatggaacactgaagcggcagctggatgaagttgtgtcagagaaccagaggcttaaagtccctagtccaaagcgaagagttgtctgtgtgatgatagtattggcatttataatactgaactatggacctatgagcatgttggaacaggattccaggagaatgaaccctagtgtgagccctgcaaatcaaaggaggcaccttctaggattttctgctaaagaggcacaggacacatcagatggtattatccagaaaaacagctacagatatgatcattctgtttcaaatgacaaagccctgatggtgctaactgaagaaccattgctttacattcctccacctccttgtcagcccctaattaacacaacagagtctctcaggttaaatcatgaacttcgaggatgggttcatagacatgaagtagaaaggaccaagtcaagaagaatgacaaataatcaacagaaaacccgtattcttcagggtgctctggaacagggctcaaattctcagctgatggctgttcaatacacagaaaccactagtagtatcagcaggaactcagggagtgagctacaagtgtattatgcttcacccagaagttatcaagacttttttgaagccatccgcagaaggggagacacattttatgttgtgtcatttcgaagggatcacctgctgttaccagctaccacccataacaagaccacaagaccaaaaatgtcaattgtgttaccagcaataaacataaatgagaatgtgatcaatgggcaggactacgaagtgatgatgcagattgactgtcaggtgatggacaccaggatcctccatatcaaaagttcgtcagttcctccttacctccgagatcagcagaggaatcaaaccaacaccttctttggctcccctcccgcagccacagaggcaacccacgttgtcagcaccatccctgagtcattacaatagcaccctgcagctatgctggaaaactgagcgtgggaccctgccagactgaagagcaggtgagcaaaatgctgctttctgccttggtggcaggcagagaactgtctcgtactagaattcaaggaggaaagaagaagaaataaaagaagctgctccatttttcatcatctacccatctatttggaaagcactggaattcagatgcaagagaacaatgtttcttcagtggcaaatgtagccctgcatcctccagtgttacctggtgtagatttttttttctgtacctttctaaacctctcttccctctgtgatggttttgtgtttaaacagtcatcttcttttaaataatatccacctctcctttttgccatttcacttattgattcataaagtgaattttatttaaagcta

SEQ ID NO: 188 - DNA, 4104 bp, Homo sapiens
ataactttgtagcgagtcgaaaactgaggctccggccgcagagaactcagcctcattcctgctttaaaatctctcggccacctttgatgaggggactgggcagttctagacagtcccgaagttctcaaggcacaggtctcttcctggtttgactgtccttaccccggggaggcagtgcagccagctgcaagccccacagtgaagaacatctgagctcaaatccagataagtgacataagtgacctgctttgtaaagccatagagatggcctgtccttggaaatttctgttcaagaccaaattccaccagtatgcaatgaatggggaaaaagacatcaacaacaatgtggagaaagccccctgtgccacctccagtccagtgacacaggatgaccttcagtatcacaacctcagcaagcagcagaatgagtccccgcagcccctcgtggagacgggaaagaagtctccagaatctctggtcaagctggatgcaaccccattgtcctccccacggcatgtgaggatcaaaaactggggcagcgggatgactttccaagacacacttcaccataaggccaaagggattttaacttgcaggtccaaatcttgcctggggtccattatgactcccaaaagtttgaccagaggacccagggacaagcctacccctccagatgagcttctacctcaagctatcgaatttgtcaaccaatattacggctccttcaaagaggcaaaaatagaggaacatctggccagggtggaagcggtaacaaaggagatagaaacaacaggaacctaccaactgacgggagatgagctcatcttcgccaccaagcaggcctggcgcaatgccccacgctgcattgggaggatccagtggtccaacctgcaggtcttcgatgcccgcagctgttccactgcccgggaaatgtttgaacacatctgcagacacgtgcgttactccaccaacaatggcaacatcaggtcggccatcaccgtgttcccccagcggagtgatggcaagcacgacttccgggtgtggaatgctcagctgtgcatcgacctgggctggaagcccaatggccgtgaccctgagctcttcgaaatcccacctgaccttgtgcttgaggtggccatggaacatcccaaatacgagtggtttcgggaactggagctaaagtggtacgccctgcctgcagtggccaacatgctgcttgaggtgggcggcctggagttcccagggtgccccttcaatggctggtacatgggcacagagatcggagtccgggacttctgtgacgtccagcgctacaacatcctggaggaagtgggcaggagaatgggcctggaaacgcacaagctggcctcgctctggaaagaccaggctgtcgttgagatcaacattgctgtgctccatagtttccagaagcagaatgtgaccatcatggaccaccactcggctgcagaatccttcatgaagtacatgcagaatgaataccggtcccgtgggggctgcccggcagactggatttggctggtccctcccatgtctgggagcatcacccccgtgtttcaccaggagatgctgaactacgtcctgtcccctttctactactatcaggtagaggcctggaaaacccatgtctggcaggacgagaagcggagacccaagagaagagagattccattgaaagtcttggtcaaagctgtgctctttgcctgtatgctgatgcgcaagacaatggcgtcccgagtcagagtcaccatcctctttgcgacagagacaggaaaatcagaggcgctggcctgggacctgggggccttattcagctgtgccttcaaccccaaggttgtctgcatggataagtacaggctgagctgcctggaggaggaacggctgctgttggtggtgaccagtacgtttggcaatggagactgccctggcaatggagagaaactgaagaaatcgctcttcatgctgaaagagctcaacaacaaattcaggtacgctgtgtttggcctcggctccagcatgtaccctcggttctgcgcctttgctcatgacattgatcagaagctgtcccacctgggggcctctcagctcaccccgatgggagaaggggatgagctcagtgggcaggaggacgccttccgcagctgggccgtgcaaaccttcaaggcagcctgtgagacgtttgatgtccgaggcaaacagcacattcagatccccaagctctacacctccaatgtgacctgggacccgcaccactacaggctcgtgcaggactcacagcctttggacctcagcaaagccctcagcagcatgcatgccaagaacgtgttcaccatgaggctcaaatctcggcagaatctacaaagtccgacatccagccgtgccaccatcctggtggaactctcctgtgaggatggccaaggcctgaactacctgccgggggagcaccttggggtttgcccaggcaaccagccggccctggtccaaggtatcctggagcgagtggtggatggccccacaccccaccagacagtgcgcctggaggccctggatgagagtggcagctactgggtcagtgacaagaggctgcccccctgctcactcagccaggccctcacctacttcctggacatcaccacacccccaacccagctgctgctccaaaagctggcccaggtggccacagaagagcctgagagacagaggctggaggccctgtgccagccctcagagtacagcaagtggaagttcaccaacagccccacattcctggaggtgctagaggagttcccgtccctgcgggtgtctgctggcttcctgctttcccagctccccattctgaagcccaggttctactccatcagctcctcccgggatcacacgcccacagagatccacctgactgtggccgtggtcacctaccacacccgagatggccagggtcccctgcaccacggcgtctgcagcacatggctcaacagcctgaagccccaagacccagtgccctgctttgtgcggaatgccagcggcttccacctccccgaggatccctcccatccttgcatcctcatcgggcctggcacaggcatcgcgcccttccgcagtttctggcagcaacggctccatgactcccagcacaagggagtgcggggaggccgcatgaccttggtgtttgggtgccgccgcccagatgaggaccacatctaccaggaggagatgctggagatggcccagaagggggtgctgcatgcggtgcacacagcctattcccgcctgcctggcaagcccaaggtctatgttcaggacatcctgcggcagcagctggccagcgaggtgctccgtgtgctccacaaggagccaggccacctctatgtttgcggggatgtgcgcatggcccgggacgtggcccacaccctgaagcagctggtggctgccaagctgaaattgaatgaggagcaggtcgaggactatttctttcagctcaagagccagaagcgctatcacgaagatatctttggtgctgtatttccttacgaggcgaagaaggacagggtggcggtgcagcccagcagcctggagatgtcagcgctctgagggcctacaggaggggttaaagctgccggcacagaacttaaggatggagccagctctgcattatctgaggtcacagggcctggggagatggaggaaagtgatatcccccagcctcaagtcttatttcctcaacgttgctccccatcaagccctttacttgacctcctaacaagtagcaccctggattgatcggagcctcctctctcaaactggggcctccctggtcccttggagacaaaatcttaaatgccaggcctggcaagtgggtgaaagatggaacttgctgctgagtgcaccacttcaagtgaccaccaggaggtgctatcgcaccactgtgtatttaactgccttgtgtacagttatttatgcctctgtatttaaaaaactaacacccagtctgttccccatggccacttgggtcttccctgtatgattccttgatggagatatttacatgaattgcattttactttaatcacaaaaaaaaaaaaaaaa

SEQ ID NO: 189 - DNA, 1386 bp, Homo sapiens
gccccatctccttgggctgcccgtgcttcgtgctttggactaccgcccagcagtgtcctgccctctgcctgggcctcggtccctcctgcacctgctgcctggatccccggcctgcctgggcctgggccttggttctccccatgacaccacctgaacgtctcttcctcccaagggtgtgtggcaccaccctacacctcctccttctggggctgctgctggttctgctgcctggggcccaggggctccctggtgttggcctcacaccttcagctgcccagactgcccgtcagcaccccaagatgcatcttgcccacagcaccctcaaacctgctgctcacctcattggagaccccagcaagcagaactcactgctctggagagcaaacacggaccgtgccttcctccaggatggtttctccttgagcaacaattctctcctggtccccaccagtggcatctacttcgtctactcccaggtggtcttctctgggaaagcctactctcccaaggccacctcctccccactctacctggcccatgaggtccagctcttctcctcccagtaccccttccatgtgcctctcctcagctcccagaagatggtgtatccagggctgcaggaaccctggctgcactcgatgtaccacggggctgcgttccagctcacccagggagaccagctatccacccacacagatggcatcccccacctagtcctcagccctagtactgtcttctttggagccttcgctctgtagaacttggaaaaatccagaaagaaaaaataattgatttcaagaccttctccccattctgcctccattctgaccatttcaggggtcgtcaccacctctcctttggccattccaacagctcaagtcttccctgatcaagtcaccggagctttcaaagaaggaattctaggcatcccaggggaccacacctccctgaaccatccctgatgtctgtctggctgaggatttcaagcctgcctaggaattcccagcccaaagctgttggtctgtcccaccagctaggtggggcctagatccacacacagaggaagagcaggcacatggaggagcttgggggatgactagaggcagggaggggactatttatgaaggcaaaaaaattaaattatttatttatggaggatggagagaggggaataatagaagaacatccaaggagaaacagagacaggcccaagagatgaagagtgagagggcatgcgcacaaggctgaccaagagagaaagaagtaggcatgagggatcacagggccccagaaggcagggaaaggctctgaaagccagctgccgaccagagccccacacggaggcatctgcaccctcgatgaagcccaataaacctcttttctctg

SEQ ID NO: 190 - DNA, 1730 bp, Homo sapiens
ccttcataccggcccttcccctcggctttgcctggacagctcctgcctcccgcagggcccacctgtgtcccccagcgccgctccacccagcaggcctgagcccctctctgctgccagacaccccctgctgcccactctcctgctgctcgggttctgaggcacagcttgtcacaccgaggcggattctctttctctttctctttctcttctggcccacagccgcagcaatggcgctgagttcctctgctggagttcatcctgctagctgggttcccgagctgccggtctgagcctgaggcatggagcctcctggagactgggggcctcctccctggagatccacccccaaaaccgacgtcttgaggctggtgctgtatctcaccttcctgggagccccctgctacgccccagctctgccgtcctgcaaggaggacgagtacccagtgggctccgagtgctgccccaagtgcagtccaggttatcgtgtgaaggaggcctgcggggagctgacgggcacagtgtgtgaaccctgccctccaggcacctacattgcccacctcaatggcctaagcaagtgtctgcagtgccaaatgtgtgacccagccatgggcctgcgcgcgagccggaactgctccaggacagagaacgccgtgtgtggctgcagcccaggccacttctgcatcgtccaggacggggaccactgcgccgcgtgccgcgcttacgccacctccagcccgggccagagggtgcagaagggaggcaccgagagtcaggacaccctgtgtcagaactgccccccggggaccttctctcccaatgggaccctggaggaatgtcagcaccagaccaagtgcagctggctggtgacgaaggccggagctgggaccagcagctcccactgggtatggtggtttctctcagggagcctcgtcatcgtcattgtttgctccacagttggcctaatcatatgtgtgaaaagaagaaagccaaggggtgatgtagtcaaggtgatcgtctccgtccagcggaaaagacaggaggcagaaggtgaggccacagtcattgaggccctgcaggcccctccggacgtcaccacggtggccgtggaggagacaataccctcattcacggggaggagcccaaaccactgacccacagactctgcaccccgacgccagagatacctggagcgacggctgctgaaagaggctgtccacctggcggaaccaccggagcccggaggcttgggggctccgccctgggctggcttccgtctcctccagtggagggagaggtggggcccctgctggggtagagctggggacgccacgtgccattcccatgggccagtgagggcctggggcctctgttctgctgtggcctgagctccccagagtcctgaggaggagcgccagttgcccctcgctcacagaccacacacccagccctcctgggccagcccagagggcccttcagaccccagctgtctgcgcgtctgactcttgtggcctcagcaggacaggccccgggcactgcctcacagccaaggctggactgggttggctgcagtgtggtgtttagtggataccacatcggaagtgattttctaaattggatttgaattcggctcctgttttctatttgtcatgaaacagtgtatttggggagatgctgtgggaggatgtaaatatcttgtttctcctcaaaaaaaaaaaaaaaaaaaaaaaaaa

SEQ ID NO: 191 - DNA, 1204 bp, Homo sapiens
gaaattcttacaaaaactgaaagtgaaatgaggaagacagattgagcaatccaatcggagggtaaatgccagcaaacctactgtacagtaggggtagagatgcagaaaggcagaaaggagaaaattcaggataactctcctgaggggtgagccaagccctgccatgtagtgcacgcaggacatcaacaaacacagataacaggaaatgatccattccctgtggtcacttattctaaaggccccaaccttcaaagttcaagtagtgatatggatgactccacagaaagggagcagtcacgccttacttcttgccttaagaaaagagaagaaatgaaactgaaggagtgtgtttccatcctcccacggaaggaaagcccctctgtccgatcctccaaagacggaaagctgctggctgcaaccttgctgctggcactgctgtcttgctgcctcacggtggtgtctttctaccaggtggccgccctgcaaggggacctggccagcctccgggcagagctgcagggccaccacgcggagaagctgccagcaggagcaggagcccccaaggccggcctggaggaagctccagctgtcaccgcgggactgaaaatctttgaaccaccagctccaggagaaggcaactccagtcagaacagcagaaataagcgtgccgttcagggtccagaagaaacagtcactcaagactgcttgcaactgattgcagacagtgaaacaccaactatacaaaaaggatcttacacatttgttccatggcttctcagctttaaaaggggaagtgccctagaagaaaaagagaataaaatattggtcaaagaaactggttacttttttatatatggtcaggttttatatactgataagacctacgccatgggacatctaattcagaggaagaaggtccatgtctttggggatgaattgagtctggtgactttgtttcgatgtattcaaaatatgcctgaaacactacccaataattcctgctattcagctggcattgcaaaactggaagaaggagatgaactccaacttgcaataccaagagaaaatgcacaaatatcactggatggagatgtcacattttttggtgcattgaaactgctgtgacctacttacaccatgtctgtagctattttcctccctttctctgtacctctaagaagaaagaatctaactgaaaatacca

SEQ ID NO: 192 - DNA, 554 bp, Homo sapiens
aagggggaatttgattgctatttggtattaaagagttttaagattcaaccacctggtacaacagcaggctctgaaggggaagccagacagggaacctagaggtacaagcaatgtctccccagctgtcagcctcaatgagaatcaccacccataaataagctaattattgacaagattataatctttcgaatatgttcaaaacaggtctgactagtgactatgagaatggagctatttagagttgatttaaaagaaaacactttattgttcagcaattaaaagttagccaaatatgtatttttctccataatttattgtgatgttatcaacatcaagtaaaatgctcattttcatcatttgcttctgttcatgttttcttgaacacgtcttcaattttccttccaaaatgctgcatgccacacctcaatacatgccgcgtgatcctagtagttttttcacaaccttctacaagtttttgggaaaacatctgttatgatgactttcatacaccttcacctcaaaggctttcttgcacctcggcagggcccagctcg

SEQ ID NO: 193 - DNA, 426 bp, Homo sapiens
  misc_feature (415)..(415): n is a, c, g or t.
gcttcactgctttatttttgaaatcacaagcaattcaaagtgatcatcattgaggcttctgttaaaagttcttccaaagttgcccagttttaagattaaacaatattgcactttaagatgaactaacttttgggattctcttcaaagaaggaaagtattgctccatctgtgcttttcttagactaaaagcatactgcagaaaactctattttaaaaatcaacactgcagggtacagtaacataggtaaagtacctgcctattttagaatcctagagaacatttcattggtaagaaactagcccattatttaagtgtccacagtatttttcatttcagtggtccaagatgccgaaggtttccagacaccaatcttggttctctaaatactggctccaggtggggatatccaattcnggtcaccatgg

SEQ ID NO: 194 - DNA, 31737 bp, Homo sapiens
gaaataaaagattaacaaattctgatcaaaagatcgagttactattatttgattaaaaacaaaaaaacaaaaatcattacataaaagaaacccaaagagtaatctagtaaataatttttttctttttttttcttgaaacagtgtctcactttgtcgcccaggctagagtggagtggcgtgatcttggctcactgcagcctccgaggcctcctgggttcaagtgattctcttgcctcagcctcccgagtagctgggattacaggtgtgcgccaccacacccagctaatttttgtatttttagtagagaaggggtttcaccatgttgaccaggctggtcttgaactccttaactcacgtgatctgccctcctcggcttcccaaagtactgggattacaggcgtgagccaccgcactcggctgataaatttttttttttaaagcttaatattaagtgttttcagaaaaacatttaaaacaaattttaggccgggcgtggcggctcacacctgtaatcccagcactttgggaagctgaggcgggcagatcacttgaggccaggagtttgagaccagcctgcccaacatggagaaattctggctctactggtatggtggtgcacgcctgtagtcccagctactggggaggctgtggcaggagaatcgcttgaacccgggaggcgaggttgcagtgatctgagatcatgccactgcactccagcctgggtgacagagcaagtttctgtctcaaaaaataaataaaataaatataacaaaacaaattttggaacttgaggcttatcagtcagttttacatagttcactgcagtagcttctcgttgctggatatttacatactgctcactgagtttaagtcaaaaggtacatacatacattattacagcattgagaattttccatttcaatggatgattataatgtcgaacaaggtcaaaaagatacagactattaatagtagatgcatttgagttaaaagcttaagtaaataatctctgacttaaatttttattttctcccaaagacatttaatgggcccctatgaagtattagggagagatcagacactgaaggattggtaacaaaattgaaacttaagaactatatatagttgaagaattgattgttgaagcactgataataatcgaagtttccgaaatgattttgatctttagaaacagttatgtttctcttgagggagagtttttattctaacaggtctttctttagaggtaatggatcctttttagttctaagtcccttcctccaacaccaagtgcaatctactccaaactaggcaggcggtgtttcctgattatattcagagtcccctggcctaaatgggaaaggccacacctcaacactttccttgcttctgggtagtctaactatccaaagccctaacagtgtagccatctttaacacaacacagtgctaaaacctccaattcagccaccaataataacctcagaggaaaagagaaaatctcctaaaggtctctctccatctaagttaacttgccaaaaaaagttttgcctccagtatacttttaaaaggagacataatcatacccattcagtaacttaacacacatgtaaatgttagaaggtagataggtttatggtattttaaataactccagacacaatatatatcaaattcctgatttaaagtagttctgaacaagcagtaaaattaacattagttcacactagaggaaacagtgattccttacagagaaaaggtatactttatgtaattaatttcattcttaagacactttaaaagcagaccaaaatctaaacaaaactttttctatcagaagataaaaataatagtcctacagttgcttcataatgcaatattttattttggggaaaaggcagagacttcacttagctatgatcataaaaaagcaatataaatagtgattttcgtattcatttttctgaagttattattccaccttacctttatttggaattccataaaactcttctctgaacattgtgtatcctgtctgaaaactagcaaccaaaactacaaacttttaagtcttccactttacacagaaatcaataaactagttttaatattggactgaatttcaaagttctattctctgttcctatttggctgaaaggtatacatatatcaagaaagtttctatcgattttcaactagaagtatcagttttgctgtcagagctctttatttttgtacataaaaggaagtgggttttgatactatctcagtgttcttcctgtcttacaatgcatttgaaataaagtgatgtcagattgagagtaaaggcccgaaataagaaaaagtaataggcacaattagcttgctttacctttattgataactaagatttagaactgctttgctgtatactcactgctggctacatgtctgtcactttaatttgcactggactacaaaaacatccacaaatatataatatatacctacaaattatatggtatctatatcacatgtatgacccatgaaagacagatgcatattctatgagagactaaatcattcttcataattggtagcttggcattcatttcttgagaatatcagagctgcttaaacatgaatcacatgtgacatcatgcgcacctctcacctcaccttctagataccacacaccgcccattttcctctaggctttattatagactacctgcaaccagaaaagagctttatagagcatctcatcttactgtaaactgaggacaaataatcaatattataataatttctagaaaaggaataaatgaaaagcagctcaaaaacaattggacccaatattcaatttgatattaccttattgttcatgtcttctattattatgcagagtgtggagcaaggttatgttattcatatctacctattcggctactgacaatagggttctatggttaattcttggatcttcctacatcttaacacattcacctcaaattcttagagacagccattaataaccgttagttataagcaaaagaaacacagatacaacagccactattcaaagagcagcatatgtggctcttgaaaagcaagggccccaagtatattcccattttacaagactttctttaatattgatttccctgtcccaatcccatccagaaaacatgaatcttgctaattgcttcccttacttgatgacctggcttggctcctaatcttagatctacaattccaaacttaaaaggaaaagcttaaaatgaggagaatcaacacttgtgaaaagaagcgaaaaaattaaaataaaaaaaaataaaatgaggagaagcaggggatagagacagccctttacacttttggcttcactttttcaaaaatacgtgcttagtggaccccagggaatggagggccctggactacacctcttttcactactgacagggattaatttaaaaccacacatcaacaattaactagtcagaagcaccctctttgtcttgctttcattccatttattcctaacaattgaggtctgggtagctctctaagtggttatcaacttaaagctaagattctctgattacaaagttcgctcaaattatgtatgtagtagctatagcagagaacagatgaggccatcaattatctcaattctctccaggagtagcaaaaacattaacagagggatggtagtgaattataactatttttctaatataggcatagtaaccattctgaagggacttaaatgaatgagtctagtattccaacataacctgagcttctagctccaaagacaactcacctatcatcactcaaatctaaaaggatattcaagctagaaaaaatcttgaatgtctgttttgctctggaacatgtcagtccttgtaaaggaatcatcaagagttggtttaaaatttgccttgccatgtacagctaaattataaatattgggataaacaagatttgccctctttgaatagactctgacaagaagctacagaataattagcagtaattaggcaataattcatatccttaactggaaaatccattccagggaagctgcagcaacagacattattccctaacgaaagcttttcaggtgagttatgaagtagacaccaaacggaataagagcaaagaccagcagactaaattcagtgtttgctagtagaaatgaaaagcattcttttcctaaggagggttgttagagcattaagtgctcaaagtttaggcaagtaaaataaaagcatcctaaaaggctatggatgacttaagaccttaagaacaaatccaggtaaaacctagaatgttgtctggtgtggtagccactatcctcatgtggctatttaaagttaaaataaaatcaaaattaaattcctaactagaactccacatgtcaaaaagaaaagaaatccagatacaggtctcacacgcttcacaaaaaattaactcaaaatggatcacagacctaaacaaaaatgaaaatttctaaaactcccagaacataacataacattgaagaaaatctaggggttttatgatgacttttagatacaagaccaaagacacagttcacaaaagaaaaaatgtgatacactagacttcattaaacatttctgatctgagaaagaaactgccaagaaaatacaaagacaagacaggtgcggcgggctggatgggcgcagtggctcacacctgtaatcccagcactttgggaggccaaggcgggtggatcacgaggtcaggagttcaagaccagcctggccaacatggtgaaaccccacctctactaaaaatacaaaaattagttgggtgtggtggcgggcgcctgtaatcccagctactcgggaggccaaggcaggagaatcctttgaacccagaaggcggaggttgcagtgagccgagatcgctccactgtactccagcctgggcaacagtgtgagactatgtctcaaaacaaaaaaagacaagacacagaaaatatttgcaaaagacatatgataaaggattgttactcaaaatatacaaagaactcttaaagctcaacaataagaaaacacacaacctgattttaaaataagtcaaagaactgatgagacatctcacgaaagaagatatgtagatggcaaacaagtaaatgaaaaggtgctccacaacatatgtcattagggaaatgcaaattaaaacaacgagatactactacacacctatcaggccaaaatccacaacaataaccacactaaatgctgacgaggacatgaagcaacaggaactctcatccactgctggtgcaaatgcaaaatgcaaaatgatacagtcactttggtagactggaagtttctataaaaccaaacatactcttaatcatatgatccagcaatcacactccttagcatttacccaaaggtgctgaaaacttatgcacatacaaaatctgcacatagatgtttaaagcagctttattcataattgccaaaacttggaagcaaccaagatgtccttcagtaggtgaatgtataaacaaactgtggcacacccagacaatggaaagaaatgacctattgcaaatgaataccagaacagaaaaccaaataccgcatgttctcacttataagtgggagctaaatgatgagaatacatgacacacagaggggaacaacacacactggggcctttcagagggtggtgtgggggaggagggagagaatcaggaaaaataactagtgggtactaggcttaattcctgggtgatgaaatcgtctgcacaacaaacacccatggcacaagtttacttacggaacaaacctgcacctgtacccctgaacttaaaagttcaaacaaaaaagaaagaaatgacttatcaacccatgaagacacagaggaaccttaaatgcatattacttaaggaaagccaatctgaaaaggttccaactatatgacattttggaaaaggtcaaactatggaaacattaaaaaatcaatggttgtcaggccaggcacagtagctcacgcctgtaatcccagcattttgggaggccgaggcaggtagatcacctgaggtcaggggttcgagaccagcctgaccaacatggtgaaaccccatctctactaaaaatacaaaaattagctgggcttggtggcaggcacctgtaatcccagctacttaggaggctgagtcagggtaattgcttgaacccaggaggcagaagttgcaatgagctgagatcacgccattgcactccagccagggccacaagagtggaactccgtctcaaaaaaaagtcagtggttgtcaggggttaggaggcaggaagggatgaagagctggagcacagaagatttgagggcaatgaaactattctgtttgatactataatggtgaatacacatcgttatacatttgttcaaagccataggatgtactctcccaacagtaaattctaacgtaaaccatggactctgggtgatgatgtgccaatgtaggttcatcagctgtaacaaatatagcactctggtggagaatgtggctagtggggaaggctgtgcatgtggcgggggaggggtacatgggaaatctctgtaccttcctctcaattttattgtgaacctgaaacagctctaaaaaagaaagcatttttattttttaaattccttggtcataataaccatatttcaagtattcaataggcccatgtagctactggctactgtgttgtgctggacagtaaagatataaacatctccatcattgcagaaaactctccttgacaggactgttatagagggtaagggaaagtgactgactgacctggagtctgggaaaagaggaactactaacaagggcatttgtcctacagcatttagtactttattgaaggatcaggtggatttacctttccttttccacctgctcttttttccctccttgttgctgccaccatcactgctgctgctgctgttctcagaactctgggaatctgactgaccatcactgctttcttctgaaccttctgacagctctttcaccccatccggcacatctttctgaaaatgtaggcatccaattaggattaatcattaccatttaagcaaacagaaattaaaacttctgatatgcaatgttgcaacttaattgcactaatttttgttactataggattcagtagcagaaccagcaatattttctgaattcctgtcatctctttgaggcaaataagctaatgtttccaactatatccgaagataaaaattatatacaacattcatatgcaggcacaacacaggcttaaattagacaaaaattgggtagatatgagtccaggtaaatgattaaatactcttacattttaaaaactacataataattttattggctgggcgtggtggttcacacctgtaatgctaacactttgggtggctaaggcagttagaatgtttgagaccaggagttcaagaccagcctgggcaacatggtgaaacccgtctctacaaaaaaaaaatgcaaaaaaaaaaaaaaaattagctgggcatggtggaacgaacactcctgtagtcacagctacttgggaggccaaggtgggaggactaagcccaggagttcaagaccaacctgggcaacatggtgaaaccccacctctacaaaaaaaaatacaaaaattagccaggtatagtggtgtgcacctgtggtcccagctacttaggaggctgagttgggaggatcacctgaacccaggaagtttgaggctgcagtgagctgtgatcgtactactgcactccaacatgggtgacagagtgagatcctgtctcaaaaaactaaataaaataatttcattaaatatatgtatgtccatgtgtgtatgtaagtaccactatgtactctgaattcaattacagagtaagagtctagacagtaagagatagtgcattatttgaatctaattggttcctgaatattggttagtaagtagcaagaattaaataaaaaagaaatctttttttaaatgaaggttcttcctgacagaaaaaaagaaaaagaaagaaatcatttaacaaatcatatgaaactctttggtttctgcactgagagagaatgctaatcagaaaggataactacgtcagcttagcatgtgagagatataataacaggatagttccaagaccaaagactagaaaacaagacttcctggctttaccctctcctaattgtgcagttaaaatcttaacctttcatgcttcagtttccccatctataaggtggggataatagtacctaccttaaaagatcattcttcaattagctcaagttaaatgagctaataaatgtaaaatgcttagaatcacgcccaacataagaggtcaaaaaatatcagctactatgtgtttacataatatataaaaatacacatgtatggctaaacacactagtgagtgtttgtggttttttgttattttgggagacagggtctcactctgtcacccaggctggagtgcagtagtgcaatcacagctcactgtagcctcgacctcccaggcgcaagcaatcttcccacctcagcctctggagcagctgggactacaggtgtgtgccaccatacccggctaattttttaaatttttttataaagctggggtcctactatgttgcccaggctggtcctggatttgaactcctgagcttaagcaatcctcttgccttagcctcccaaagtgctgggattacaggcgtgtgccactgcgcctagcctgtgaatgttatttctaagctataaaactatcagtggttctttttacctccaatattttattttcccacatcgttttaacaatcagataaaaaataattctgacagacacaaaaatgtgaccctcctacataaaactgacatccgtatgacattatagccaagactataaactctgatctagttaagttaggtatttttcatttaaatttatgtcctagtgccatttctctctgagccgtctcttatgttatacactttcttaaaatacacaccctatatttttctattatttccttcaaaatgcaggacagcttttatagagttagttgtcagccagacatcttgtcatataggttcaacaagtatctgaaatataaatataattatcttcttttcttaaaatatgtgatccgtacaggatcaactgcctatgccccaaattctagaatcatttcagccccttttacccactccaaatgctacatattctatttattcctctaatgtcctttgtctccatctcttttactagtctcttaattcaggccctgagtatttcttccaaacaaccataaccacctttctgacaaattttcctgcttcactcttaaatctatcctacttgagttattctcttaaacttggatttgattatgcttttctcctgaaaaacctgtgacatctaccacccaacaacccatacacaaactgctcagtcaggttttcaaaggcctccaatgtttgatctctacctaacgtttaccacactggaatctttaccacttaagtccacgcaaagattatggtctaatcactccaatttactctactttcaagtccactctgaatctttccaactgtgcccttgcttaagctattcctatgtcctggaaggcccttcttcttactacttatctgacaaagtccagctcaaatcttacaagttaacaacaacaaaaaacggctacattcctttattcaaaattaattcttatttctctatattatcacattttttaaaagcaaagaacattttgagagcaggcaattattttaggaactataatgtgagcttcaagagctcaggggccacagcttaaccctctttacagtctctatagtgtccagcacagaggtaatattgtgatatagtatgaaatatatatttggttcctgactacagttcctggcctagagctctttttagctgttataatttcctaagcaatagtgttactagtagaatcttttgctattatttggtccttgatcccagcttccaacacagagctcctaagacctctgcaatttcctgagtaaaaggagcatctgacacagctcctatgtcccttggaatttcctgggtgataggagcatcttttcttcctcttggtgagctactgcatagtctcaggatgggggttagtttccaggggaaccaactatgtgactagagggttggaactttcactcactccccaatctcagggagggaggagactgaaggtggagctgatcaccaacggccaataatttaatcagtcatatgtgctgaagctttcataaaaacccaatggattgggttctgagagctttgagatttagctgatcacggctgggtgcggtggctcatgcctgcaatcccagcactttggtaggccaaggcaggcagatcacctgaggtcaggggttcgagaccagcctggccaacatggtaaaaccctgtctctactaaaaatacaaaaaattagttaggcgaggtggcaagcacctataatcccagctactctggaggctgaggcaggagaactgcttgaacccgggaggcggaggttgcagtgagctgaaattgcactgctgcaatccagcctgggcgacagagcgagactccatctcaaaatgaatgaatgaatgaatgaatgaatgaatgaatgatttagctgatcacatggaggttcctggagggtggcaagcctggagagggcacacaagctctgtgtaccttcctacaaacctcacactaagcatcttatccatctggccattcatctgtatcttttgtaatatcctttataataaatgggtaaatgtaagtaaagcattttcctgagttcagtgagtcattctagcaaattaatcaaacccaaggagggaaccccaattataaccagacagtcagaagtacaggtcacaacctgggacttgcgacagttggcatctgaaggggatgggagggtactgagccctcaacctgtggaatctgacactgtctccagatagatagatagcatcagaatggagttgaattacagcagtggtccccaacctttctgcatcagggactggtgctgtggaagacaatttttttcactgaagggtcagggagtgggatggtttcagatgaaactgttccacctcagatcatcaggcattagattctcatacagagtgcatgacctagatccctcaaatgtgcagttcacaatagagtacgcactcctacaagaatctcatgctgccactgatccgacaggaggcagaactcaggcagtcatgcttgcttgcccaccaatcacctccagctgtgcagccgggttcctaacgggccacagactggaactctaattgttaaaggacatccagctgatgtctgctggagaattgcttggtatgtgaggagaaacctccacacatctggtgttagaagtattgtacttaacggtgtatgagaatagggaaaacactttggtttttttttccccccaatctctacaatagaataggcatttaataaattttttaaacagtatggaaggtctagaacagctaaaaccaaaaagaaatacagaaagttccatgtgagaatagagccctgtaaccccaggaaattcaacaaagtatataaaaaggaggcaggtgggtaggtaggttagatctttctaatgttaggctctacacaaccattgggcacagtgatgactgcagctcaaagctaaaaggtaacacatatatgcatggacacagtcactgcctaccaagcattcattccccttcagctgataaatttcctttggggaaaactctctcctcaattcacctggcttgagcaagcttaatctcaaccacatctacaactggccaatcatttgacaagtgtgataattcaggtatactcatgtgggcgaagccaaaccaattaagccaaatcagaataaagtcagaggctcctgctttagttcttatctctcttcagatttacagcttgcagagtgcaggttggggctgaagttatatatgatgaggagaaactctgactgagagcgaagtcaaaaggaagtggagacaccaaaccctgatgatgtcaactgagttcctggatccagcctgggtttccttagaattttcagttacataagctaataaattgtcttactcaaactcatttgagttggttttcctgttcgtaagtgaaaagttattgataagtaaaggtctcttctcagtgcaggaatttgaaattggcaagcttgaaggccgggcacggtggctcacgcctgtaatcccagcactttgggaggccgaggagggtggattacctgaggtcaggagtttgagaccagcctggccaatatggtgaaaccccatctctactaaaaatacaaaaattagctgggcgtggtggtgggcatctgtaatcccagcttcttgagaggctgagacaggagaatcgcttgaacccaggaagcggaggttgtagcgaaccaagactgtgccactgcactccagcctgggcaacagagcgagactgtcaaaagaaagaaagaaagaaaagaaagaaattagcaagcttgttatgttagaaagaatatgggcttgggaattcagtcagatctgggttcctataccggttctgatactatatgggcaacactgggcaagaaaatccaatcttctgaactttgactttctccattataaaaacggaataataaccacaactgtgaattgtggtagagaataaaatgagaatgtaatgtaaagcatctaggcagaatgctccaaagaaacaattattatacaaatgttgtgaggcttcttaaacaattattatacaaatgttgtggggctctccatcataaaaatggaatatttatcatttttactagaatttcaggtatataatagtctatagaaaaatatacattttcctaattgtaatcatatttctttttcctgtctttttgtacttatctaacaaaacaaacagcaataaaaaattattaaatggtattcaccccaactgtgaattgtgagagagaatgaaatgagaatgtaatgtaaagcatctaagcagaatgctccaaagaaacaattattatacaaatgttgtggggctccttaaaacactagaagtcattttatttattttttattttattttattttattttattttttgagacaaagtctcactctgtcgcccaggctggagtgcggtggcgtgattttggctcactgcaacctccgcctcccgggttcaagcaattctcttgccttagcctcctgagtggctgggactacaggcacacaccgctacgccctggctaattttttgcattttagtagaggtggggtttcactgtgttgcccaggctggtcgcaaactcctgagctcaggcaatttgcccacctcggcctcctaaaatgttgggattacaggcgtgagccaccacgcctggccataagtcattttaatttcgttctttctagataagattatcatcaagaataaaaaataaagttacttctctgatctacctatagttagttatagattagtttttaaaaaatgtattgggtagaggtttcaaaatattacctcttcctgaaaataagctcttcaagaacagaattctgtccctacgagtcaaatatttatatgtggtcacttcctgttttttctttctaaatgactccccaacaaaatatttaccttcaaagtatatactcccattctacctggaaccttatagaagatgccctcttcacctctggagtttgtgtgaagcattgcattcaggcatgcaagaggagaagtcccactgcaaaacaaagaagagatgtgataaggaacacaacaattaatttctgtctctgaatatcctatgtaacactcaaaataaaattaattagtcaatactcctttgacttaaacatatcttataaactataagaagtctaccaatatagaaaggggctgccatggagaaaatggatgtaaaaatcatttccatgtatctacaaaatagtaattccttaatgctgatccagtatctaacatttaagtcaagaaaaatacagaagtattacaaacatattttgtaaacattctatttagcacaagctttacaaatgtccagaggtaaaatgagaaaaaagaacacaaacacacacagattcaaataaacagtaataattccattgtatactgctgcaccagactgaatcttaattgtgaaactaacacattgccattgtctcttgtattcaaacctatcatgagatcacttaaaaagttattaagtaggcttctgaatatttatatgtagcaacttggttaaatgtttattaattctaatatatatttatcatctttactagaatttcaggtatataataatctatagaaaaatataaaatataattaataattataccacagttaattttgcaccaaccaaatattttaaaatagtgctataatacttgaagacaatgtttctacatctaaggaaaataacaaaatcattagataaaatatcatacttcacataagaaaaaaattaggtagcaagcaaacacatagttcatatggaagcaattaaatggaaaccgtggtctgaagtctctggagatgtgtggcatccttaaatggtttttaaaaactgatcacaatacctgaggtttaaggcagtttaaccccacatttccagctcttttccctctcagttttctgttgatgctactcaataaccaaaaataagcctactagaagaggctgttggattcttagtctatctaaggagttatctgctgggaagagctgggacatgagtccactgtctcttggtactgtgaaagtgtccagggtcgaaaatacagagaaggttttcatccccccaaaacattggtgaataataacaaaggaaagaaaagccttttgcagaagaaactattgagcatttccaagttgatttccatagctacgtttatctgatttggatttccatgttaaaaatgtatataatgtaattccaatcaggatcccaaagtttgtatcaaataaatatataaaaattgccaagaaatttccagaaaaaaaatgatgggagacttgcttaaaaagatattaacatgtactcttagccactattattgaagtagtatgtttccgagagaaaaaaaatcaccaaatgaataccctcatagactgttggtggaagaaaacagaaaatgcagaaacagataataatttaaaaggtatcatttatgtttagtatgaaaaacatgaggtcatgccatagtcccctgtagtttgactacctggcttctgttccctcttctttggagacagtacccaaaaatttcctgtgaaacaacttttctcactttcagtcatgtggttgagagggactgaatcccatgcccagcccgggggtaaatcctaattggtttaaattaatcagcttttacacacacacacacacacacacacacacacacacactctccaccccaaagaacagatacatgacttagggccaaaaatctatggagctatttacttgggtatatgggggggaaaaaaaacaaccaaaacttgttctccacggaatcttcagaaagggatcctttctcttcccttgtgtggtattaggaagcaaggcctaaaacattcacagtcattgtgtgaccacaaaggaaaaatctggaattagaatggcacaacatacaagacagactgaggagtgacacagtatgaatcgtaaggagaaatccaacaccaaaaagggcagaactgagaaaagtcaggaagcaaatttgtttttgtttttgagacagagtctcactctatcccccaggctggagtgcaatggtgcaatcttggctcactgcaaccttcatctcctgggttcaagagattctcatgctcagcctcccatgtagctgggattgcagatgcctgccaccacaccctggtaatttttgtattttcagtagagatggagtttcaccatgttggccaggctggtctcgaactcctgacctcaggtgatctgcccacctcagcctcccagagtgctcggattacaggtgttagccactgcgcctggccaaaatttttaaagtagtattacttttgcctgtatcaagccttttttgttttgttttttggagagacctgttctttatttcaaaaagacacttgtgtcaatatttggtatcaaaagagttgcactattgatttgtctttctcccagttggccccaaagagaccacatcaaaggagtgtacattttaagccaataagctgcaggatgtacacctaacagacctcattgaaaccttaccagaaaatggggattgggtagggaaagaaactttaaaagatcagcaaactgccagcccacacactgtataggctgtcacagccagacagggtggccagggtgccacaaacccaaagaagcaaagcttcaaaataataaaaaactttaaaagttttgtacataagctattcaagatttctctgatacaaagtacaatgagatagcacttttagagagagcagcttcaaacccagaaaaggataatgagatgagtttcacatggctaaatcagtggcaaaacataatctttcaaggagggaggatagcaattaagtggtcactgcaacataaggggcacatgatccattctgcaggcagttgagagggggcagagttgggacaaaaatttagtttcagaggtcttaccattttaatttggtcacttctaatgaaaaaaaaaaaagaaataacattgtccaaagatatcttaaagctgaaaacctgaaaagcacatttttgttttgtttttgttgttgtttggctaactcctcctggaatcacctttctggtttggggggtactttttacagagcagtgaaatttcccataatggattctttccctgggctctgtttggctctcagtaaggcaggcctataccttttcctcttctctatggaaagggcaatatgcattaagctgaaaagtcaccttccaaaagtgaaaaaggaatagattgctgcttcagagctgtggaattatttggaatgttttacaaatggttgctataaaacaacaaaaaaggtattacaaaatgtgtacatcacaacatgcttttaaaggcattatgcattgtgttcacattcccttaagtgttgttcccaaaggtgcacagcctctagcccagctggaatctctgggaagaggcagagacagtttagcgaaaaagacacaggggaggtgggggcagcgaaaggagaaagcagccttccagttataaaggtcagctttgggtaggctggcctcagatggaatcagggtcagagggaggagcagcagcagggtgagactgaggtgctctacatctcattcaggtcaagcagagtctggtccagcatcctttgtacagagtgcccctctttggtacattttcagtttatcttccaagtcatcagttgtcttttccagcttggctaccgatctctcagcaaactcagcacaggtctctacctccttgagtttatcagtaagaatcttgatctcttccacgtttgtcttctttttgagagtacttttcttcagcatcactcagacacttcaggttatggtccatcagtctcatctgctcatccatctctcggcaatgggacactgccagctcagctcgttcctctgtgagttccaagtctctttcaatgaccaccaacttacgagccacctcttcatacttcctatctgcctattctgcagtgtgtttagcttctttgagttggatttcctggaattccatcttttaaggtccagtttttaacaaccttcatatctctctcactctgatcagtagctttttccgcttcttccggcttttgcagggcagtggccacgtgctcctgagcacagtccagctcctcttcaaccagctggatcctatggttcaaggaggccacctcagcctcagcctgttcccaggcgcgcctttctccttcagcttctcgctggaggtgctcagctctctcctctgcatcatctgcctgctgctgcagaacctggatattgtgcttcactgcctcaatagtggtgatcccagccatggtgcccacccagctactgctcacactccagatcctgcctcctctgctcagcgttgcagctgcttctcaccagtgtatcaagtcttgccttgagccagtactacctttggaattttgttgagatttaagtcacaagaagctgaaaaagtcctaaataaaacagtttagtagtgctagaatatctcatacatctggggggaatgtgcacacagtatatacaaaaacatattccaaatgaattaaaagccaaaggcaaaatataaaagattaaaagaaaacagtataatcttctgggcactgtggctcatgcctgtaatccaagcactttgggaggctgaggcgggtggatctcttgagtctagtctgagcaacccctgtctctacaaaaaatacaaaaatacacacacacacacacacacacacacacacacacacacacacacaaaatcagccatgcattgtggcacacgcctgtagtaccagctactttggaggctgaggcgggaagatcacctgagcccaggaagttgaggctgcagtgagccatgatcacaccactgcactctagcctgggcaacagagtgagaccatggcttaaaaaataaataaataaataaataaataacaaaagaaaacagtataacctagaagacagagaaagctttccacaaaagagaaaaacccaaaaaccaccaaagaaacatattgactgtataaaataaaaatttctacacaggaaaaaaataaaagcaacaaaactacagaaaatatatgaagctagaataattaactgcaaaacatacggcagacaaaagattaatagtcctaagaagatattctttaggaaaacaaatagctcattagaaaaaaatggaaaaaaggacgtgaacaaatgattcataaaccataaatgtaaattaccaataaaatgtataataagaagctcaaacttaatagtggttataaaaaggcaaattaaatcaagatgccattggtcagatggaaagaaagaaaatgacccaagccatagttaacagttttatgccaatgtcaatttcctggtttgatataatatgtatttatatttatatttgtatttatttatatttttttgagatggagtctcactctgtcagcaaggctggagtacagtggtgcgatcttggcttactgtaacctctgcctctcgggttcaagcgattctcctgcctcagcctcctgagtagctgggattagaggcacacaccaccacacccagctaatttttgtatttttagtagatggggtttcaccatgttggctaggctggtcttgaactcctcctgacctcaagtgatccacacgcatcagcctcccaaagtgctgggattacaggtgtcagccactgtgcctggtctgatattgtactatatttacataagatattaccattaaaggaaactggatgaactgtacatgggaccctaggtactatttttgcaatttcctgtgagtctataattatttcaaaaaaaaaaaaaggctggccgcagtggctcgcgtctataatcccagcactttgggagccgaggcaggtggattacctgaaggtcaggaattaaagaccagcctggccaacatggtgaaaccccatttctactaaaaatataaaaaattagctgggtatggtggcgggcgcctgtaatcccagctactcggaaggctgaggcaggagaatctcttgaaactgggaggtggaagttgcagtgagccgagaccgcgccattgcactccagcctgggcaacaacagtgaaaattaatctccaaataacaacaacaataacaaaaaatggattgataaaatccattgctgacaaggttatgggcaaataggcactcttacagactgttgagaggacagaaaactgctgccttttcccacattactcaattctgccttaggaaagtaatatggaaatatccattaaaactaaatatatttgggaccactgatgcaacaatcccacttgaatctgtcctacaaaaccaaggccaaaggacttaaggacaaatgtgcaaggatttactccatcattgaaagcatcaaagcactgaaaaatgacctcaaactccattaagaagagaatgttgactatgataataaagtaaccaacaggatagaaatcaacaacagccatgttggcagctaaaagagtgctaagttccaggaagcattttgtttagtcctcacaacaatctatgaggtgagcaaaattattacaccgtttttacaaatgaagaaactataagttttcaataagctgttcaagatcatattatcaataaatggtgaagtcaagattccagtaacaagaaggaaaagagaaacagaactagaaagagattactttaaaaaggacataaaaccaagaaaaaaaacattttcaataagctacctggtaaatttaccccaattaatggtattcagttccaatattaagtacccactctgtttagggcagtaaactaggattagtggatccacagagggaagctttcttagcttagaatctaatagagaagataggcaagggagtaaacagccacaccacactgtgaccagtgctattaatataaacacaggtccacagtccctgatctaaaacacttaggccaaatgtttcagacataagaattttttggattttaaaaaggtaacatgatatgccataaatgatatgacactgccatggagattagggacagcatcccataaccaaacacaatgaaacatatgaatactcacactaagatggataaataaagattatatacagtctcatgtcagttcaagagaactgttgttgtcaagtgagtttggtgctaaatgtatgaggaaacttagtttttcaaccactgcggatactgtaattatgggtaagagactgtaaagtgtgtacataaagtgctttaagtcagagagaaaaaaaatcagtctagtctggcttagcacttagaagagtaacaacaacaaataacaacaaaacagtcattaaagtgaaacctataaaatgaaagtaaatggcacacacatctggtgaaaagatgtggtaagaataactacaaactgtcggccgggcgcagtggctcacgcctgtaatcccagcactttgggaggccaaggcaggcggatcatgaggtcaggagatcgagaccatcctggctaacacggtgaaaccctgactctactaaaaataccaaaaattagccgggcgtgatggcgggcgcctgttgtcccagctacttgggaggctgaggcaggagaatggcgtgaacccaggaggcggaggttgcagtgagccaaaatcgtgccactgcactccagcctgggcgacagagcgagactccgtctcaaaaaataaaaaataaaaaaaaaagaataactacaaactgccataatattttccttgcaaatctggatataattttctttgaaggaaacaaaattttgaaaaacctacaagatatacaggacacagtaccatttaaaacaaaatttaggcatgatctcaggaaaatacaaaaagtcaaagaatccgggcagtttatttttatgaataataaagcaatagcagagaagcaaaacaggacacactacccatgatggctggaatatatcctcatgggaaggtagagctccagaattctataattaaataaaagtgaacgacttgaagaaataagacatcatctgcatgggtgataaaaccatagtactgagatcaataccaacttaaaagttcaagtaaattcagtagggtaagtactaacacccgaagcagctgtagtaagaaccaccttaaagattatgtaactatcacacaacaagtcagcttctaatttttcttgtccatgctcaagagattggggttgaagaggtaggggttctgtcaaggaaaggaacaagtgcagtgctataattttatgcggtgagcatgtaagcaaacatactaatatgttttgtacataaggcccaaagaactaaagtgactttgatcatattgccaatggccctttttagttctctctgtaataaaagctagcagtagctagtagggctaagagagcagaagtcaatcattgtactgcttagataaagcaaatatagcaattaatgaaaggagtcatcactgcatggtaaagagccagatttaatgattcataccaatctgaatacagacctgactgtagcctgggcaagtcactttaaacacccttaatttactcatctgcaaaatagaggtaatactgcctactgtgtaactcgattgtacagatcacagataatgtacataccaagtatatgtcacagagtcaagattcagtaactacagcagttactttaccaacttactatcctaccctagtctggcagtgttccagtgttccccatctcaagtgataggaatctcaccctcacatacaactattctccactctgaagccagagtaaccttttaaatataaatatgatcatactacctcctgtccagcttaaaattcatccatatcataatgttcttagtataaagtacaaaattatcaaaataatctgaccttgaccaaaataatctgaccttgaccattctgctacacaccctctctgccagcctactctacctttcttttcatttggtaatttaaaattcttctgactacttggcccaacacttctgcttgcaatgataaccctcacctccttttctcctagcaacctccaattcaacttttcagattttagccttaatgtctcttgctaaaataagccacttctatgttctataaatcctatacttctctgaaacacatatttataactacatatactgaaaggaaaaaatctgactcaactgtaagcgagccagactcagtgatgagtgattttaatgtctctgaaaagtagaatctttcttctcttctacaattcaacccaaaatatccagctctaaggcctgtgagcagtcatcttgcaattatgatggatgagcctactgagaatggaacaaaattgaaggaagcagagctgagatactgatgaaactgactggagaacttggataaagttttgcctgtttttttcacttgcattaaatgatgagattccttcaatgtttaagccagtttacatcgtgtttcctgtcatttacagctggaagtatcttaatagatacaaagcacctacataaaagcaatcaaatttacagagataggaaagggaaaagaacaacaacacaggagaatattcacaggtaaaccactctcttctgttaacgagaaaagattacccttatgcatcaataatgtatattacatgataatgtaagaggtaagatgctacccaaatctgtacagactaaccccaagtactcagatactcagaaacatctaaatttttcctaaatcttggctgggtgcggtggctcacacctgtaatcccagcactttggaagaccaaggtgagctgatcacttgaatccaagaggcggaggtttcagtgagccactgcactccagcctgtgcgacaaagcgagcctccatctcaaaaaaaaaaaaaaagttaatattttcctaaatcttaagcgtcaaggataaagaaagaatcaaaccaggttccaggcgttaaaagccaaagtggcagcttgaattagtgtttccatttcatcattcacaccatcgtgtgaccttgcagtacgttacagtaagtgaaatatatttccctgccacaatgatgttcgtcttggccacaaggcttgatttgatcaatgaaataagagacatgacggaagcagaggctaaaatttgcctgtttggctgactcctgtgattgacatgagagccagattccagcagaaggagagaacaatccacagcctacaacaaagtctagctaacaataactaagccccagttaacctaaagacatgaggaagaaaaaaagtatttgttgttataagccactgaaattttaagattatgcagcaaaatattgaccaataaagcaagcactatataatgaaggaaacatttgctttcttagcaatactcactgccaaaagacagcaaaaaaagttcttaagagtatgaatgaaaaattttatatctagcctagatggcattcaaacaaagaggcaatagaaaacattcttggcttggtgtggtggctcacgcctgtaatcccaacactttgggaggccgaggttggcggatcacctgaggtctgatgttcgaggccagcctggccaacatggtgaaacccagtctctactaaaaatgcaaaaattatccaagcatggtggtaggcatctgtaatcccagctatttgggaggctaaggcatgagaattgcttgaacccaggagacggaggttgcagtgagccaagattgcactgcactccagcctggttggcagagcaagactctgtctcaaaaaaaaaaattcttaagcccgcaagaactcagggaaaagatcatccataaatgtaaaaattctagctgatgatgaaatccagccaaaaagaaatgcaccaaagtaaacaaggaatggagaaactattttttggaaaaaagtggaatacatttgcaattaggtaacatataagaaacgtaaatgttttctacttttttcaactttcatttttaaaatgacaatacactttcagaatttttctattttgtttttcctcaacttcagagatcatttaggaattaatattacctcacagtgaagaaactaaagcctagtaactttcttggtctcttcaattaaatgcaataaacaatggttattcctacttaaaagtttttcaggatatgttcttcagtgtacatttttttcactgattaatttaatttgggtagggggttatcaggcatcatttctacaagaaatattgaagtaaatagtccggaaatatacaaataaactattaaaacaaggaaacttctgaaagacaatagagctctttttgaaaatcactttgtcacagggcatgctattaaaaacaaaacaaaaactagaacagcaggtaagaggggaaattgcatacagatggaaatgaaagactttcacttaaaaagacacactgaatagcaaggtacttgttcaccaagtacaagatgatacactgacagagagtgagaaccccagatgcccacaaatacaaagaaggggatgcctatacataacattcaaagatcaagagacaagccaaagatgaagctgagaaaactagtggttttagaatgagtatatttagatcatatcaccaaaacttttaatcatttaagttacatggtaatgatttttaggggaaaaattagctcttcacttaaaacacattaatataaaagcattttcagcattttgatggtaacttgaaagtctgttacatcaaagtatattttcaaatagaatttcaaaggctttgcaaacctatgatagaatggctcacctgttaaaatttatctttcatttagagtatatttgaccaatgacttactatacctcaaatcctgtttaaaaatccatgctgggccacgcagtggctcacgcctgtaattccagcactttgggaggccaagacaggtggatcacttgatgtcaggagatcgagatcagcctggccaaaatggcgaaaccccgtctctactaaaaatacaaaaaacttagctgggcatggtggcgggcacctgtaatcccagctactcgggaggctgaggcaggagaactgcttgaacctgggaggtagaggttgcagtaagccgagatcatgccactgtactccagcctgggcgactgagtgagagctcatctcaaaaaaagagaaacccatgctaaagacttctctaaatgctgttcttggaggaattaaattgctacttaccctaaagcaataaatgactatagcagaaataacccaaagaataagaatccatgaggtcatgctaagaataaatgaacaaatcaacgagtgggggagaattcctcacagtaaaattccaacaaaaaatatatatatataccaagattgacagaattagaaaatcaccatatgcggcaacagtgataggaagtttcaggtaagattagtggatgctgtggtagacagacctaaaaaggcttccagtaatccctgctttgtgtactcatggccctacataattccttcccctgtagtgtgggtagggcctgtaatcagcttctaataatcaaaaaagaacaaaggtaaagggtctcacataagtgactatttcacatatgactgcagtgtcctcgcttgatgactcttccttgctggctttgaggaagcatgtggccatgttggggaaggccacagaactcaggacagcctctagccaaatgccagctaagaatccagaccctcaatctgataacccacaaggattgaatctttccaacaaccacatgagcttggaagctgatcattccccaatcaagtcttcaggtaaaaactcagccctgaccaacgctctgctgcattgccgaggatcaggtaaagccgtgctcagactcctgacacatagaaactgagataataaatgcactgttttaagctgctaaatctgtgataatattgttaagcagcaatagattaataacatgctaaaattagtgggcaaaggtacaatgagaaacaagatgtttacagagtctcagagtatcttcaccccaaaatacttactaattacaaaggggaaaaatggtatctttacagtgaagaaacagtagacattgcataaaccaagtaatcacagttaccatcactaatactgtggtacactgaaatcatggaatccagatatattatggtaaaaatgtcctatcgatcctgtgacactcctgccaaaactgcacaacttaaatctaatcataattaaacagcagaaataaaaattgagaaacaatctgcaaaacagctggcctgcactaaaaaaaatgtctagtcatgaaagataaagactgaagtacaattccagattaaagaagagtaaagatacatgaaaactaaatgcaaatacaacatgtgatcctggattaggacatcagtgggagaattaccaaatctggataaagtctgattagataatattgtgccaatgtagatttcctattaactattttaccctgtagttaaagaatgtacttgcctttagaaaatatattctgaagtttgcttgcttgactgacttatttatttatttatttatttttagacaggatcttgctctgtcccccaggctagagtgcagtggtgcaatcatagctcactgcagccttgaactcctgggctcaaatttaattctcctgcctccacctctagagtagttgggactacaagtgtgcaccacgatacctggctaattattttattttattattgtatagagacgggctcgctttgttgcccaggttggtcttgaactcctgcactcaagcaatcctcccacctcagctcccgaagtgctgagattataggtgtgaaccactgcatcaagcctactctgaagtatttaaaagtgaatggggcattatgtctacaatttatcctcagacatctcagaaacacaaattagacagatgttaacatctggagaatccagataaagtttatataagaattctttgtactacctttgcaacttttctaagtctgcaatataccatataaagttaaataaatgtatatgatttttaaaaaagtaagtatatgagaaaagtctatacaacaatttggaccaatgaaaagaaagaagtactgatcaatgctacaaacatgatggaatttggagtttatgattacatattatatgattccatttatatgaatgtccagatatggccaaacttacagagacagaaagtagattacaggctgttaggaggagccagcattacccgtatccagtatgagagatctcactggagtgatgaaaacattctaaaaccggattatggtgataatagcacaactcagtaaatttacttaaaaccattgaactgtgcactgaaaacaggtggagtttctggcctggtgtggtgactggcccaaaatcctaacactttgggaggctgaggtgggaggatcgcttgagcccggaaatttgagaccagcctgggaaacatatggagaacttgtctctacaaaaaatgtaaaaattaagaaatcaggccaggcgcggtggctcacgcctgtaatcctagcacactgggaggcctaggcgggcggatcacctgaggtcaggagttcgagaccagcctgaccaacatggagaaatcccatggagaaaccccgtctctactaaaaacacaaaattagccgggcatggaggcacatgcccataatcccagctactcaggaggctgaggcaggagaacagcttgaacccgggagatggaggttgcagtgagccaagatcgcgccactgcactccagtctgggcaacaagagcaagactccgtctcaaaaagaaaaaatcaaaaaaataaataaatagccaggtgtggtggtgtgttcccatagtcccaactactccagaagctgagatgagaggatcccttgtgcccaggagttcaaggctgcagtgagctatgactgtaccactgcactccagcctgggtgacagagcaagaccctgtcaggaaagaaagaaaaaggggaaagggaaaggaaaggagggaaaaaaaaaaaggaaaatgaggtggaatttggagtttatggcatgtaaactacacctcaataaagttgtttttaaaaaaatatgcggggctgggcgtggtggctcacgcctataatcccagcactttgggaggccacagcgagcagatcactcgaggtcaggagttggaaaccagcctgaccaacatggtgaaccaccgttgaaacatgagccactgcctggcctgttcccatattttctatgaacacgtatatattctcccagggtcccagggtcaaataaaacaaaatgtatccagaaaacaaagcacttgatcacttgactaaccaaaggaaaagaaaaccattccaaaacaaacaccataaatatccacttatcaaataagaagcagcaagaaaatgaaaacactggggcaacttatgtctctctgctttatttagagtgttcatctttctgctgtttctggacctgcactatgatggacggacactaatgaatggattcaatatggcacaaactgatctaccatgtaaagagtacaataatgccactgacactcctagaacaactcctgcttatgatgcaatgagttgcaagtaattcaggttatctggcgaactaaagatttaatggactgaatctcactggcaagaagcctatcaacattaatactaaaaattgagttggcgagaagaattcatcttccaccttcacacagaaattttgaaagcccaaaaatgataataaaaggtaaaagaaacttgtagataataaaaggtaaaagtaactctttactctgcaaggttttctctacataaaaatttaacagtaagtcctcgggccccttttcctacacttttctcttctccccgaccggaggggccgctctttctgcgcggtgcattctggggaccgaggtggagcccgccgctgccgccatcgcctgagggaagcgagaagaggccgcgaccgggagaaaacgcagagtcgtcaccggagagaagtcgactccctagcagcagtcgacgccagagggccgcccacctgttcgcccgtccccctgccctgttcacaatgcagcctgcttctgcaaagtggtactatcgaagggactatgtcttcactgaattctgtgaacacagtaaggatgttcatgtaaattttgaaaaatccaaacttaacattcagttgtctcagaggaagtgataattttaagtatttaaatgaagttgatctttttcacagtattgatcctaatgattccaagcataaaaaaaacggacagatcaattgtatgttgtttacgaaaaggagaatctggccagtcatagccaaggttaacaaaaggaagggcaaaactcaattggcttagtgtggacttcagtaattggaaacactgggaagatggttcagatgaagacaggtctaattttgatcgtttctctgagatgatgaacaacatgggtggtgaagaggatgcagattgaccagaagtagatggagcaggtgatgattcacaagacagcgatgatgaaaaaatgccagatcgggagtaaggaatactgtcatcacctggattttgggaaagaaaaataacttctctgcaagatttcacaattgagagaattcctaagttgacagctctaaaggcagatgctgtatttgcctactttgacccatttttcagcctgcttgtttttttaaaaggcttcactaagggttgatatgtaccattgtatggggcaattttaagtcagctaaggcaataaccttatgcatgaacatttcctagattttcatgaagctgttgagtgaggtcctaggcaattgatgcagcagttgtgataaataaaaacatctcaccacctaagtctccttttcttcataacatagatactgacatgataggaagctctcagcttacggaaagagaactaaattttagattatagaacatggattcaaaaatggctggaacaaattggctgacaccttactggtaacctgctattcctctggtgttatccttcaggattgttccaagtttatttttcaaaatatttacttcacattattctatataagtgattacttgtcagtattcacatgtatcttagctaaaactagagaatgccctaatttagatggtttttgaagcctgtatatttggtattgtttgacccttaggtgtttttacatctcttagcacggaagatgaagaaagctgtacattgttgtttgtttaagagtctgtacatttagaccagatttgtatctgcactgtcagtatggcaaatgagtgaaaaacgtttaatacagtattggatttctttctttttttttttttcagcttataccagggcttaaaacctcaatttatgttcatgacagtggggatttttcttgatgtccacattctttctaataaactgttggaagacttcttggctgtccttttaagtgtctggcttactgtaatttttatgtatttaccacttactggaatggagtttttatttttaattgaggaaaaatttgggattatttctctgtttgaaaaaagaggcttgctgtaatgtcataggaaacctttttaaagtggatctgtaatagaatattgtagatgcactttgcagcaattggaaaagaaagtgttgtgatttgattgaaataaaactaaatgtgttgtcctcctctaaaatatatatagcaataattagtagttatgctgaaattaataatttgaaactatgtttatgtactgaaaggatacatttataatgctgttttgaactaaaggtttcaatataaaagaaaaaaatacaaata

SEQ ID NO: 195 - DNA, 2098 bp, Homo sapiens
cggcgcggcggctgggagccgggcgcgggcggcggcggcggggccgggcgggcgggtcgcgggggcaatgcgggcgcagggccgggggcgccttccccggcggctgctgctgctgctggcgctctgggtgcaggcggcgcggcccatgggctatttcgagctgcagctgagcgcgctgcggaacgtgaacggggagctgctgagcggcgcctgctgtgacggcgacggccggacaacgcgcgcggggggctgcggccacgacgagtgcgacacgtacgtgcgcgtgtgccttaaggagtaccaggccaaggtgacgcccacggggccctgcagctacggccacggcgccacgcccgtgctgggcggcaactccttctacctgccgccggcgggcgctgcgggggaccgagcgcgggcgcgggcccgggccggcggcgaccaggacccgggcctcgtcgtcatccccttccagttcgcctggccgcgctcctttaccctcatcgtggaggcctgggactgggacaacgataccaccccgaatgaggagctgctgatcgagcgagtgtcgcatgccggcatgatcaacccggaggaccgctggaagagcctgcacttcagcggccacgtggcgcacctggagctgcagatccgcgtgcgctgcgacgagaactactacagcgccacttgcaacaagttctgccggccccgcaacgactttttcggccactacacctgcgaccagtacggcaacaaggcctgcatggacggctggatgggcaaggagtgcaaggaagctgtgtgtaaacaagggtgtaatttgctccacgggggatgcaccgtgcctggggagtgcaggtgcagctacggctggcaagggaggttctgcgatgagtgtgtcccctaccccggctgcgtgcatggcagttgtgtggagccctggcagtgcaactgtgagaccaactggggcggcctgctctgtgacaaagacctgaactactgtggcagccaccacccctgcaccaacggaggcacgtgcatcaacgccgagcctgaccagtaccgctgcacctgccctgacggctactcgggcaggaactgtgagaaggctgagcacgcctgcacctccaacccgtgtgccaacgggggctcttgccatgaggtgccgtccggcttcgaatgccactgcccatcggggctggagcgggcccacctgtgcccttgacatcgatgagtgtgcttcgaacccgtgtgcggccggtggcacctgtgtggaccaggtggacggctttgagtgcatctgccccgagcagtgggtgggggccacctgccagctggacgccaatgagtgtgaagggaagccatgccttaacgctttttcttgcaaaaacctgattggcggctattactgtgattgcatcccgggctggaagggcatcaactgccatatcaacgtcaacgactgtcgcgggcagtgtcagcatgggggcacctgcaaggacctggtgaacgggtaccagtgtgtgtgcccacggggcttcggaggccggcattgcgagctggaacgagacgagtgtgccagcagcccctgccacagcggcggcctctgcgaggacctggccgacggcttccactgccactgcccccagggcttctccgggcctctctgtgaggtggatgtcgacctttgtgagccaagcccctgccggaacggcgctcgctgctataacctggagggtgactattactgcgcctgccctgatgactttggtggcaagaactgctccgtgccccgcgagccgtgccctggcggggcctgcagagtgatcgatggctgcgggtcagacgcggggcctgggatgcctggcacagcagcctccggcgtgtgtggcccccatggacgctgcgtcagccagccagggggcaacttttcctgcatctgtgacagtggctttactggcacctactgccatgagaacattgacgactgcctgggccagccctgccgcaatgggggcacatgcatcgatgaggtggacgccttccgctgcttctgccccagcggctgggagggcgagctctgcgacaccaccgcggccgc

SEQ ID NO: 196 - DNA, 31737 bp, Homo sapiens
gaattccaggatgggtgctgggtgagagagacgtgtgctggaactgtccagggcggaggtgggccctgcgggggccctcgggagggccctgctctgattggccggcagggcaggggcgggaattctgggcggggccaccccagttagaaaaagcccgggctaggaccgaggagcagggtgagggagggggtgggatgggtggggggtaacgggggaaactggggaagtggggaaccgaggggcaaccaggggaagatggggtgctggaggagagcttgtgggagccaaggagcaccttggacatctggagtctggcaggagtgatgacgggtggaggggctagctcgaggcagggctggtggggcctgaggccagtgaggagtgtggagtaggcgcccaggcatcgtgcagacagggcgacatcagctggggacgatgggcctgagctagggctggaaagaagggggagccaggcattcatcccggtcacttttggttacaggacgtggcagctggttggacgaggggagctggtgggcagggtttgatcccagggcctgggcaacggaggtgtagctggcagcagcgggcaggtgaggaccccatctgccgggcaggtgagtcccttccctccccaggcctcgcttccccagccttctgaaagaaggaggtttaggggatcgagggctggcggggagaagcagacaccctcccagcagaggggcaggatgggggcaggagagttagcaaaggtgacatcttctcggggggagccgagactgcgcaaggctggggggttatgggcccgttccaggcagaaagagcaagagggcagggagggagcacaggggtggccagcgtagggtccagcacgtggggtggtaccccaggcctgggtcagacagggacatggcaggggacacaggacagaggggtccccagctgccacctcacccaccgcaattcatttagtagcaggcacaggggcagctccggcacggctttctcaggcctatgccggagcctcgagggctggagagcgggaagacaggcagtgctcggggagttgcagcaggacgtcaccaggagggcgaagcggccacgggaggggggccccgggacattgcgcagcaaggaggctgcaggggctcggcctgcgggcgccggtcccacgaggcactgcggcccagggtctggtgcggagagggcccacagtggacttggtgacgctgtatgccctcaccgctcagcccctggggctggcttggcagacagtacagcatccaggggagtcaagggcatggggcgagaccagactaggcgaggcgggcggggcggagtgaatgagctctcaggagggaggatggtgcaggcaggggtgaggagcgcagcgggcggcgagcgggaggcactggcctccagagcccgtggccaaggcgggcctcgcgggcggcgacggagccgggatcggtgcctcagcgttcgggctggagacgagggtgagtttttccccctctgccaccctcagcccccacccgcccctccccacacaaccaacacgttctccccacacgactctctcgttctccccacagccaggtctccagctggggtggacgtgcccaccagctgccgaaggccaagacgccaggtccggtggacgtgacaagcaggacatgacatggtccggtgtgacggcgaggacagaggaggcgcgtccggccttcctggtgagcgtgtctgccctccctgcgtcaggacgcggccctgcccagaccgccccgccgggccaccatctcactgccccgacctctgtcttctacagaacaccttaggctggtggggctgcggcaagaagcgggtctgtttctttacttcctccacggagtcggcacactatggctgccctctgggctcccagaacccacaacatgaaaggtgaggggcttcctgccacacttggggtggggggcacgcgagaggagctgagtgggacctcactccttccccatccacagaaatggtgctacccagctcaagcctgggcctttgaatccggacacaaaaccctctagcttggaaatgaatatgctgcactttacaaccactgcactacctgactcaggaatcggctctggaaggtgagcaccagcgctccttccggaagcctccaggcccccgagcaccctgcccccatcccacccacgtgtcgctatctctaggtgaagctagaggaaccagacctcatcagcccaacatcaaagacaccatcggaacagcagcgcccgcagcacccaccccgcaccggcgactccatcttcatggccaccccctgcggcggacggttgaccaccagccaccacatcatcccagagctgagctcctccagcgggatgacgccgtccccaccacctccctcttcttctttttcatccttctgtctctttgtttctgagctttcctgtctttccttttttctgagagattcaaagcctccacgactctgtttcccccgtcccttctgaatttaatttgcactaagtcatttgcactggttggagttgtggagacggccttgagtctcagtacgagtgtgcgtgagtgtgagccaccttggcaagtgcctgtgcagggcccggccgccctccatctgggccgggtgactgggcgccggctgtgtgcccgaggcctcaccctgccctcgcctagtctggaagctccgaccgacatcacggagcagccttcaagcattccattacgccccatctcgctctgtgcccctccccaccagggcttcagcaggagccctggactcatcatcaataaacactgttacagcaatttgtctcgaggactctggaatccgggctgtgggcatgatgtgggggaggccagccttgggcagaggggggctggggggcatggggaggagtacatgaaaagggggatgggggttccagggtgggggattctgggatgggtgcagcgcagcacacaccaggggtggggtgagcacagggtgtgtggacctcaggggtgcagggcaggcggtcagcatgcagtgatggcagtggaggggctgtgggaccaggggcttcacagactgggcgggggctgggcttgcggagggggcctgcgctctgaggcaggggtcggggaccaccaaaccatccccgagcgagtgcctcctgtcgccccaaagtcccatcagaatgacgccttggtgctggccccagacccctgaagcccgggctaggtgactggggtagagctggccatggccgctctgggaggcccacaaggtgctctgggcgaccccaccccgacaggggcacgaaccccgcgccagtcccgttcctgctccccttttgctgtgggtgggagccggggccacgccggagggacggccccgcacaaggagccagggggttgtgggggagccggtgggcttctcagtgggcaggtggccttggggcagaggtcctaaggaggccaggggaccaggaggagggaggaagaagttgagggtggccacagggaggaggtgaggaggagcgggagggcccagggtgaggggctcccgggctccctccccggggtcttgctgctggagctccaagaaccccggtatgcaggggttcgctccccaggtgccaaggcagcccactcatgggttccgggtcagcttccccgcagaggccagtggccggcagctccctcagccaggcctcccagctcccggcccctcgctgtgcaggcgctgggaacacaaggggcagcccctggaaataagggtggggtcccggcctccccattccttcccccctcccccctgccttccacccccattcccagtgcacagagctgtcaggaaaattcctccccgactgacaaagaacagacaggaaggcggttagggacgcccctcccctaccggcccagccgcccttggggtcttggtgtccagggcggaagagcagggtggttccccacgtcccttgggtctggcctcccctctgcaccctctcttgccccctccccatccagctgtgggccctggggactgtcagagaccgaggggtttccagggacacacttgtgtgctaaaacctgggcgggtggtcaccccccaggatgcatgtagacatccggtgagggagtctcttgaagtctctgggatggtgcccctgggactggctgccatctcatggaggaggtcagaggtcgctggggccagcccagggtgaggccgcattcatcttcctgaccctacaggccaatttgacttacccaagtgggttttggccggcaggatgaagtaacccatccattacatgtcaagagttaggtctataaacggcctttattataaacatccaactctgcaggaggtttacaaagcagggctcaggagataaaagccggcttccccaggtggcggctgcagggtgcggcaggcagccccaggggtgcccagggtggcggggcaggggaaccgtagggagggggagaggggcacccagaaaacctctcctggagaacatggaagactctgcccacttcaaatccctgcctggggaaggacacatgggaatggggccgggggaaaaggcgggccacctcgggccttcgtcacctgtgtcagctcctagggattgtctcctcctggtcacttggagagaacaggcgtgctggacacgtccacatctctgggcccggggtgtatgaatgacacgcttgctctggagtttccacctgggagctgtatggggacagggctgttcctcctcacacccgctggggaagggacacaggcctcttggtggcccccaccatctcccagcactgcccatggctgtgcccacgctggctgccccctgagagcaggacgtgtactcaggggcagcgcctacctctgggcagcccaggtttctctgctccctgcagcggaacgggcttcctagggcagttcctggggtggtgtccctagggcagcccctgagtgctggagggggtctgggccacaggccctgaaacagggaggtggtgggggcagcgttcagggggctgaacctcagggtgaggcgggcaggcggggagccacaggcccgggggccccgcagcaggtgctcagcctcggagcctcctgccgcaccccggggcgggggctgggagcccgcccgagcccctagctctgagcgacctgccaggttggaatgtgtgtttatctttggcccaacccgatttcctgctttttagaaaaggggcttagagagggttgttagacaggctccaggcaccccaacacccaaaggcactttgaaaacgcccctgcactgacttcagtgcggagaagcaaacgggctggaatttcactcccaaaccccaacatgggggtggcggggccggggtgagggttgtggctgcctgcaaaggtgccaggaaatctggggagggaggaacttccaccgttcagggagaccctgagggtgccctggcttctggccacgtcccagaccctgttaggcaccgaggtcttcacacccagaccctccacccacccaagtttctgcggcacgtttaggttgagtgaagaccaagtcatccagttagagaagaggacttgaggcgcgtgctgctgctgtggccacgctggaccctcggtgcacgcatctcctggcgagtcccctgtggctctgtgggccgtacacacccggggcacgcgacctcagctaccttgtcaccgaggacgtgcatccacagctgtgcgtctgtgcctgggagcggggtctccacttggtgggtctctgcatgctgaccagttaacccgcctttccgggctgtggagggcgtgggtcctgtccggcccggagatgctccgcggggtgtgtgtgtgatcgtggccctgtagcggggtggtgttccctggagggtggacccctgagcctggctgtgtgtggctgtgtctcagcatgaattccgtgacccaggagcacgttttcaggcagggattaggggcagctgggtgtgggaggcaggcacttggtataccaccgaatggagacagaaaatcccaactctacgaaggaagtgaagtcccttcaacagggacaaagcgatgttttgggtctgactacaatgcaccctgggaagtctcaaagaaaacagtcggggactcaaggagggcagccccctctccccgaccccgagctcccaggaagataaatgatttcctcctctctagagatgggggtgggatctgagcactcagagccaagggcgcagtgggtccgggcgggggccctcctcggccctcccaacatgggggccaggaggtcagcccctcaacctggaccccggctgggtctcagggaatggtctcccccagtggcccagcttgcttgtgttttcagatgggtgtgcacgggtgtgtgtgtgtgtgtgtgtgtgtgtgtgtgtgtgtgtgatgcctgacaagccccagagagccaaagacctgagtggagatcttgtgacttctcaaaagggggattggaaggttcgagaaggagctgtggtcagccttgctctcccttaaggctgtggtaaccacactaggcatagcataggcctgcgccccgtccctccttccctcctccgcgcctctcctttctctttctcccccctctaccccgctccctggcctgctcctggtgacaccgttggcccccttccagggctgagggaagccagcgggggccccttcctggaagcccacctgcaggccggcttgctgggaaggggctgctctcgcagaggctcccgcccgccctgcagccgtttcctggaagcagtcgctgtgggtattctgttccttgtcagcactgtgcttgcaaagaaagcagacactgtgctccttgtccttagggagccccgctccatcacccaacacctggctggacacaggcgggaggccgggtccgcggggagcggcgcggggctggggccggaccagtaaacacacacgggcgccaggcactgcaggctcctcctcctcctcctgcccagcgcctctgctcacaggcacgtgccaagcccctaggccaggaggcccagcagtgggtgcagagcaagctcctgggaagggggtgcagggcggacccccggggagaagggctggcagggctgtgggggacgctgaccgtgggccccacgttgcagaaaactggctgcctggctggaagatgggggagatgccaagcctctgaggcagcacgagcagggtgcatggaggccggggcgcggggaggctgcactgcagcatgcaccccaaagcccagagggagtggagaccaggccctggaatcgagaagtagaaaggcggcttggaggcctcggaaccggctgacctccaacagagtggggccggccctggaggcaaagaggtgcccggggtccggccctgcctgggggagctatgtgtcatgggcagccacaggatatgtagccagctctgagcatatggacccagggcagggctgcaaggcagggcaggggagacagacgggggagcaaggagcagagagggggcctcaggctctcccaggaggaacattctcccgacaggaggaagagacggcccaggggtgactgtggggagccatggtggcagctggggtcgtggcagatgggagagaggctggcgaggtgaaggtgcaggggtcagggctctggggcccacatgcctgtgggagcgggcaggcccagggctctccgccactccccactcccgcttggctcataggctgggcccaagggtggggtgggatgagcaggagatggggcccagggggcaagcagggccccaaagacatttagaaaaaccggtttatgcaggcagcattcagagcaggcggcgtgcgtggcgggggccctgggagcacagagaggcacacgtagggcccccgagggtctccccattggccggcagtgacatcacccctgtgtcaacagtgatgtctgcagctccggccagccagggtttatggagcgagacccagcccggcctgggccctcactccccaggcccacacactagcccactgttcagggtccggggtggcagcatggcctgggggtcctggcaccgctgctcctctgcccaccctaacttcccggcatggcggctgccccctctgagcgtccccaaccagtaagtgtggggccagcaggcctgccgtcctcctcctcttccctctagagagaaacgtggaggtcctggggctgggggcgctcatagccctgtgacacaggtgcatggggtcaggggtcccagaatggcccctgggaaggacctcagctgggccggcggctctaggcttcaggggtctgtctgcacaggggctagcccctcccagacctctgtgaagccagtacgggcctcccctccctgccccgtgctctgtccggtgcttcctggactgcactgcgggccactggtgagagggtggacagggaagggccgccgtggtgcctgttcctgcccacctggctgtgtggtcccctccaagtagggacaacccttctgagggcttgggggcaccctggggttgccagggcctcccagagccctgtgagcccctggggggtctggcctgatgcccccctccacgtccagggccggctgtggcccagaaccccagcttcccagcaggccggtgtgcggtggtgacccaggagaggcctcacctccactgaggggccaccgacctctgccaggccacagagacccccaaggagtctgaaggctggagacccggggctgggaccaggtgggactttcccacggagccgcccccaggcccagctggggacacgtcccccttctctccagacacaccctgcctgccaccacgacacaccggcctgttgggggtctcttttaagtgcttgccactctgaggtgactgtccctttccaaagaggtttctggggcccaggtgggatgcgtcggcctgagcaggaggatctgggccgccaggggctggggactgtctcctggggaaggaagcgcctgggagcgtgtgtgctgacccaggaccatccagggaggcccgtctgtggggcaagcgggaagggagcggctggagaggcttggccgcccccgccctgcctcccattccttagctccatgcctgtcaacctctgtcacccagtgagtgatgtccaggggccctggaaaggtcacagcatgtttgagcggggtgagagagaggggaaaggcgggggcggggaaaagtacgtggaggaagctctaggcccaaggaaggagaaagggttctgggagggagggagccactggggccgccgggaaggtccctgcctgctgctgccacccagaaccctcgcctcttagctagcccccgcagccccagcctttctggcctgtgcccctctcccccatccccagctgtcctgtgcaaccaggccttggacccaaaccctcctgccccctcctctccctcctcaccctcccaatgcagtggtctccagcctggctctgccctgccgcaggtcccctcccctcattccaggcctagagcctccagtcccggtggcccccagcccgagggtgaacggcctcaccctgggtcgtgggacagagggcacgttcatcaagagtggctcccaagggacacgtggctgtttgcagttcacaggaagcattcgagataaggagcttgttttcccagtgggcacggagccagcaggggggctgtggggcagcccagggtcaaggccaggctgtggggctgcagctgccttgggccccactcccaggcctttgcgggaggtgggaggcgggaggcggcagctgcacagtggccccaggcgaggctctcagccccagtcgctctccgggtgggcagcccaagagggtctggctgagcctcccacatctgggactccatcacccaacaacttaattaaggctgaatttcacgtgtcctgtgacttgggtagacaaagcccctgtccaaaggggcagccagcctaaggcagtggggacggcgtgggtggcgggcgacgggggagatggacaacaggaccgagggtgtgcgggcgatgggggagatggacaacaggaccgagggtgtgcgggcgatgggggagatggacaacaggaccgagggtgtgcgggacacgcatgtcactcatgcacgccaatggggggcgtgggaggctggggagcagacagactgggctgggctgggcgggaaggacgggcagatgggatcccaaggacatggaatttcggaccttctgtccccgccctctctgctgagcctaggaacctctgagcagcaggaaggccttgggtctagagcctagaaatggacccccacgtccacctgcccagcctagacccccagcattgaagggtggtcagacttcctgtgagaggaagccactaagcgggatggacaccatcgcccactccacccggccctgcccagccctgcccagtccagcccagtccagcccagccctgcccttcccagccctgcccagcccagctcatccctgccctacccagcccagccctgtcctgccctgcccagcccagcccagcccagccctgccctgccctgccctgcccttcccagccctgaccttcccagccctgcccagcccagctcatccctgccctacccagctcagccctgccctgccctgcccagccctgcccagcccagccctgccctgccctgcccagctcagccctgcccaccccagcccagcccagcccagcatgccttctctggctggagagcacaggcttgaccttagaaagaggctggcaacgagggctgaggccaccaggccactgggtgctcacgggtcagacaagcccagagcctgctcccctgccacgggtcggggctgtcaccgccagcatgctgtggatgtgcatggcctcagggctgctggctccaggctgcccccgccctggctcccgaggccacccctcttatgccatgaaccctgtgccacacccacctctgagctgtccccgctcctgccgcctgcaccccctgagcagccccctgtgtgtttcatgggagtcttagcaaggaaggggagctcttcaatcttgccagtcagggtgctgtctgctgagtaagtgtccccgtgctgtgccccaatgtccccatcctttggcaaacagccatcagcctgtggatcctgcactcccatgcggtgggagagggagacctgggctcacctgagcctccccacaagccagggagaggggctgcccaatggcgggaggcccccatggatcccaaacggcagttgcccgcactcctacccaggaactttgtctgtgatgaacagtaaggaataaggaagcgggtgagaaagaaggaaggaaaggcggtggggggcatggcggggggcggggagggtgtttggaaagttccagaaaagagtcacttcaccagaaaggccacaagctccccgtgcccccagcccctgctcggctccgaggtgaaggacttggagcgtcgacgctggcgtggggaccagctgttctccttgagtttgtttccttcagttccttccgggcctcaccctcctcttcctgccacacacacacttttttcctttttaaattgttttatttggggccaggtgtggtggctcacacctgtaatctcagtattttagaaggccaaggtgggcagattgcttgagtccaggagttggagaccagcctgggcaacatagtgagaccccatctctaccaaatatcagccaggtgcggcggcgcgcacctgtattcccagctatgtgggagactgaggtgagaggatcacgtgagcccaggaggttgaggctgcagcaagccatgatcataccactgcactccagcctgggcaagagagtgacaccctgtctcaaaaaaaaaaaaaagtagaaaaatttattttaaaaaattgttttaacatttgagtgctgcaactgtccaaggaggagcagacggcccgtgtcagacagcctgaagcctgactgtctgcgatcaacggccccgtggccagctgtgtgcagcagtttggcctggcctgatgcctctgtccttggcaccagctcacagcccgtgcccataacagacctggggcaccgaaggaagggcagatccagcccccacctgccctgggtctgaagatctcccaggaggctccatggggtgccttgagtgggaggggctggccgatagccttgaggaattggcacggacatgcagagaggggcatgtcccaaactcggggcgctgtggcctccagctgccaggaggtagatgtgttctgacttctgggttcccaccaccagaactgcaggggatatgaagcaagctggacttggggagacatctctgctcgagtgcacgttggcctgatgacgactgctcttgggttcacgggttccaggctctgcccgggagcctcatgcaaactggtcccgttctacagacgaggaaactgaggcacagagtgattacggctgtccctgagctcctgcagccagtaaggtgatacaccaggatgtgttcccaggttgtccgctgggctcagtaacacagtctcaactgccctgtgacactgcgtgtctgtgcttgtggggaaggtgaccagaggccccctttcctccacgcggtgagcctaccagcaaggagacagtcctcaggtgtgaggatgagcctcgtagtaggcacagagaaacaggaggaaccttctggaaggtgaagcctcccacggctgggactcttggagaagggcggatctctgtccactcctgcccactccccagcacagacagagcaagcaggacagagggcccaacgtcccaggatactgcagagctcaaaggagggcagagagcatcgccccacatgggcgccgggagaaaggtgggcggggtgctcaggggcccctggccgtcctgaagtttgcctcagagaggtgtgggcttctcctccctcccatacacagtgtctctgaggatgaactgccatgtgcccggcggggatgccgtccctggcccttgctgagtgcctctgggacgaggtcagctgagcctgccatcctaactcagacaccatctcactctccaagtcccttctcggtgagacggggggccttgcacccacctcccagcccccacacacctgagggggtccccgttcccctaccccgtggctccaccacgccccacgcatcctacctgagggacagaggggactgtgagatgccccccacaggctggttttcctctttcacccataacaggcccagcaaattctcacctccagaggccaggtctgccccgcaggtcttaggaaatacagccctacttccatccagcacaccaacccaaggaagtgcctcggagccctggggcccgaggggggcctggccttggtctcacggcggcagctccacctggagaggagtgaactcaagccaggacgccccgtctccacagcggaaaccgtgttgccggctgctccctcctggggactctgggcctgaggttcctgtgggagttggggggatagctgagtcctatggaggtgcccctctcctccccgcccagtggagcttggggtggggacaggcgaagacagggtgagaagcacggggcattccccctccacacagcgctgagaaagtaagggagcatccagaaaacggtgcccacttccgcgtcaggcggatatcacgggcaccagctccaggtgaccctagcccagccagagaacaaggaccaggttgtgccgcaaagcccgtgtccgctccctcccgcctgggaccactgtggcgaggggaagggagcgtggtggccctctcctgactcctgaggcctgaagtccaagctcccggccctcaggcaggccagggtctagacaccgctgccccaaacacaccccccagtccccgcccgcaggcttcctgcaggatcccccagtgcacctgggggctgaggagagtgagcagggcgcaaagaagcttcgtcgggagggcggtccccacccgccttggacccccggggatagtgtcctggggcctgggctcagatgcaccctgggaggaatggtgcggaggctgttttttgctccaagaggacattgcctcagcagagggctgccgagctgggaggacccacagtgcaaggccgcagaaccccctaggaagcctcagagccttcaggttccgggctgaggctgtgggcgtggacccttgtgcaaaccccactggaagaaaaaccttacagctcaggaggaggaggggccccacccgctcccagagcccgtaaacgaggggtggtgcccacatgaggcctggggaagggctggggctgggacaccccctcaccacccccagataccccaggcagcccctccctccacagagagacccactgggcctgaccctgccctgggcacagggtcgagccagggacggcccgtgggagaaagacggcttcatgggccgctggccgggccaggtgcgtccttccccagttctaggtggcaaatggggtggggccagagccttctggctagggaagacactggcctggttggtgtggcaggggcagcgaaggagggtcaaaggccactctggcctggaagagtccccagccacctggacgggggtagccaggcctggtccctgcccccactctccaaggggtcggggcagccgggcagagccagtaagtgtttgttttcagatgacatttgtaaagaaaaacagcctcccacactgcttgaccctgtgtctggaatgtggggaggcaaacagctgtgcccttcccagaccctgcacagcccctggtgggggcagggccctggtgggagcagggcccagaggtacagcctggggaggcaccggccattgtggttggagcgcggcagccaggctctgggctctgttccgggcctcactgtgtccccagtggggtgccgccaccacccccccagcctgggccccgccggtcagacacccgcagggacagcttgtcttggctagctggctacagcacctcgctggagtccagcagacacgcgctcccgtgcgcacgctgcgccccaggccagccctaacgccgctgctcgggtcaggccccccgcctgccgtgggctgctggctgccttggcccgccccagctctctccgcgcccctgcctccagggagccctcctcgaggactccagccacccaagctcagcagggccagcccgagcccctgccccacacagcctgtgtggagggtcctcagccccctgatcccccagaccctcccggcagaggctgggtccctggggcttggggaaagccggctccatggcccctggcctggatgatttcccagaggccggtcccctgccaagtgcctggtgacccttgttcctacctggctgcccatggtcctttgtgcgacccccgcccacagcccaggagctgggcaggagactctgattgggtggcagcagagccatcctagggctgcccctgaccctggccctgaccctgccctggagcctcgtttccaaatcttgcctcatgctttcgccagacccctgtggccccttcccgaccctggagtgcccctggggcttcctggaaagggcctctcctttgctcacagttgggtgccgaacttcaccagcattgaccacccgaaggcgcagggacacccccgcagtccctctcctgggggtcccatcaccaactccccatgggcgggatatcagaagaattctctgcgcaggtgctccgccccttcaggcacaggggagggcggctcaggggccaacggcagacgttggtgcctgcccctgcagcggggtgccccatgctgagacagcacacacgggggacactccgggcctcggtccaccctccatgtggcaaatgaggtgcttggcggggcttcttaactcttcaccctgggctccccacgggtcccttcccttccccttgggggccccggccccaggtccccaaggcctagacctgcctctgccaccctcagagcaaggatgcgctgcagagggagaggggctgcagctcggccccagagctccggcttcctgtctcccagaccacaaatcactaaaggccgtgggtcctgggacattgaaggcccaggaagctccttgtgttgagttaaacatagtggagcagaggcatggagctggcatttcccacgcttacgaccactctgctacgggctggggtggggctgggaatcagcttcccctgcgccccgccatcccttgtccagagggacccgtgggaaggccaggttgaagagttaagaagccccgccgagcacctcatttgccacacggagggcggaccgaggcccggagtgtccctcttgcgcactgtctcagcatggggcaccccgctgcaggggcaggcaccaacgtctgctgctggcccctgagccaccctcccctgtgcctgaaggcccagcacttccagggctgcccgagctgaggacctgtgcagagaactcttctacaccccacagaggaggctgaggggtcgaggcggctgcgggagccccagggggccaccacacagccatgcctgcccctctcctcggtgggtgtagaaagctcttaaatggtggaaaaacaagggcatggccacattgcacaggcacagaaggttccagaaggagtgaaacaatggcatggagggagcagagcctgggccggtgggggcacagggatgaggccagtgaaggccacgggttggggggtgccctgaagccaacgaccccatccttatcgcctgtgtctctctgcacacagcgtctcgtctgcaaagttagctgagcaaacgccaggagccaagggtcgaggcaacgatatccgtggggccactccacaccccctctgcctgccccatcaagacctgctttcctggttgaaatccaactcacgatttgcccccgggggcccagcagccctacccaatggagcagctgcacccacattgcccagcttcccaggcggacaggggcttggtgagccttcctgtccccactggagcatggccggagtgattttctgcttctgctgcagatcaccctggtgggagcagctgtaatcgcattatccccagttatgcctccactgggcactggggtagggacaggactgccaggacacgattccatttacctaacgccagtggagccctgggggctctcctaggtccacggggaggggtggccatctctctaggcccagggaccccaggacaggggtagaaaaccacgggagagttaaggagttaaggccagaaggggccagtccggccaagtggggcaaagctgtccaccgttgggcagggcatgactgaggggcggtgtggggaacagctgctcatctcccccaggcccatgcccgtgatgaactgtgtgactacccccaggatcagtcaggaagcttggcccaggagcctgtgcagacctaacagccagctccagccccgaggcagggcagctgtgctccagagggctcccggggccgcactgtccctcccaggtggacaccctcgtggcacgtacgcccctgctctcagccctctccttcactggatggagagactcgggacccgcagaggtgggtggcgggcagaggaggtggagctggtctgagacgcaagacgtggcctgtggattctaggagcaactggtggcttccaaggtcccccacccactccacacatgttcccaaaccccgttttgcagatgaggatggcaggctcagcacaggggcccatgtctctgtcaccaggcaaggtgggggggctctagggccagaatcgctcccacctccagccggggatcagaggtctctggttagcagccgaggcgagcgggacacaggctgagggatggggacagctgctcgcccggcacagacaaggctcccctccccatgctggagaccccggctgccccatcagtcacggcccacccaggaccatgcaatcatcctccacttctcctaatcctcctgccagcttcttcccaagagtccaagcagttggatgcattttctaaattctcaggccactgctgtttcctcctcaaattccttgtcccccacccgtggccccctcccagccatgggaaaggactgctgcggcctccccacaggcctgtgcacgggtggggctgcgtccaggcagctgtgaggtaccggggacccaggggtaagagccccgattacaggggcgtcatgggaaagtggcgaggggaggccacccagggcccccaccacagccccgctccacatcctcccctgatctctggccctggaaagaatcagatgggacccccagcagcagtcacttgagtcccactgccaccggctgtgctgaggatgcccactgggccgtgctgtggccacctggcttgcagtgtgggcaccaaggtatcggcccagattcctacccatcagagcaccagcacagggccgagccagtgccacagagcccctgggctgcagcacgtcctgcacgtcccacagaccggcctgccgggagggaggggtgctgcccagggctcggtgccctcccggaaggggcttcagtggggctgtttgccaggtggtggctctgacgcaggagaggacagatgggcagagcccgagggcagccctggccaggtgcgtacagtggtggctgtgacgccctctcccacgcctgtctctgggtccaggaggagtgatgatctccaggctccagaggactaggaacagcaggcaggctcgctgctgataacggggacttctccacctggtggggagtgatgaggcaagaccggatggcaggccccaggcctctcctctccagggacagccatcatctcctcgcctgtgcaggtctcaatcagtcagtgattacgcaaccagcaaccagcactttattgccggttgtgaagatctggaggacatgcgggtccccggggccacagccttcccgcatgggtgagcagtaagctgtgcaattagccctcaggccgtcatcgccaggccctgcctttgttcctccacctgccgcccgccggaagcctcccacaacctggccagcctgctctttctccccctccactctgaccccttcctcctcagggccctgacatgcagctatctggcacccagtttcaatacctttttctttctttttttttttttgagacagagtttcactctggttgcccaggctggagtgcaatggctcgatttcggctcaccgcaacctccgcctcctgggtccaagtgattctcctgcctcagcctctgagtagctgggattacagacatgcgccactacgcccagctagttttgtattttttgtagagacacggtttcaccatgttggtcaggctggtcttgaactcctgacctctggtgatccacccacctcggcctcccaaagtgctgagattacaggtatgagccaccgagccgggacttcttttcttttctttttcttttttccagccctcaactatccgtttcattaaaaaattcagaattctctcccctgcctgccaggatgggacccaaaactcgggcaataggcctgcccgagttgtggccctgggcctgtccccgacaagtcaccctacgttttccattccaccatcctctctctgcacctcaagcaccgtgaaccctctcccacctgcctgacctcgccgtctccaaaggagaacctttcttgtgtcatcccgccctctctaggcccgccgtctgcctgggggctgccctggtggctgtgctgtgtctcccactgctgtgcgcacggtgctgcctgctctttgcctcagaggcactggagcccatgtgctcgggggggtgtggccttcgaacactgtgagtccccacatcttgcctccagaggccacagctggcctgggccaagcctgggccacttcctctgcagtgaccaagagcagggctgcctcgagggtttcggggcaggagagagggaacaaatctcctggaggcagatgggggccacagggaggctggaggcctggaacccctcccagagagccagtggagggatgctgcctggcagatgggagatggcaggcgggtgctccaggggctcctccctccttgtagcaccttggacatgttttgttttattatggtgaaaatatgtaacaaaactagccattatagccattgagccactgagccacggagccacggagccacggagccatggagcacacacatcagtggcactcagtccattctcactgctgcgcagccatcgccaccatccacctcagacctcctccctcttcccaaactgaagctccctgaaggtgcccagcctccttgccagtagatgagatggggaggcagccctgctcgaccaaggaggcagaagtcttgattgttctccctacagtcccacgggaagcacctgcagcagggccctggctggacagacggccacaaggggtgtggtgcagtgatcgggtgccctggcctgggcaggagagtggcgcccttggcctgcccagcccctgccctgcggcccgcctgacagccgaggggagcttcaccttccagcctctggctgtcattagctgctcccggtgggaggtgggaccggcaggggaagctcagtcccacagccagtgaggatccaggctcaagcggaaccacctggacctcattattcttaagtggtccagtctgaaagtttgggaagaggggaggaaaaaactgccaatccccacgcctggggagccccaccccctcttcaagccagcactgaagccctgggggtttcagccacaatggagagctaaaccgggcccaccccagggcccaggaggggcatctgtagagggttcagccccaggaggacttggaggtcaggcaagccaacgggagttcagagcttaggaggggtgagaggtcagactctggtcctttctcatcacctggggtccgtctgtccttccaggtcacctggggtgtctacagtcaaggccagtctgacaggtgggatggtgcttcccagcaaccccaccctgaggagaaccctgctgcctctccctgctctccacccccagcacaggccccgggaagcctccagctgatgacgacaccaggacggtgctgagtggaccctggggccagcatcacaaggcacccaggaccccagaccacccagccacaccccaggctacgaggagggggcgctccggcgaggctggggtgccttcaaggtgcatcctagcaacatcctccacctgcaggagggacactcggtcacagcttggggaggatgtgctcagacggcataggaaggatttgctcagaccccatggggaggatttgctcagaccccgtggggaggacttgctcagaccccatggggaggacttgctcagaacccatggggaggacatgctcagaccccgtggggaggacatagaccccgtggggaggacttgctcagaccccgtggggaggacatgctcagaccccatggggaggacttgctcagaccccgtggagaggacatgctcagaccccgtggggaggacatgatcagaccccgtggggaggacttgctcagaccccgtggggaggacatgctcagaccccgtggggaggacttgctcagaccccgtggggaggacttgctcagaccctgtggggaggacatgctcagaacccatggggaggacttgctcagacggcataggaaggatttgctcagaccccatggggaggatttgctcagaccccgtggggaggatttgctcagaccccgtggggaggacatgctcagaccccgtggggaggatttgctcaggccccatggggaggacttgctcagaccccgtggggaggatttgctcagaccccgtggggaggacatgctcagaccccgtggggaggatttgctcagaccccgtggggaggacttgctcagaccccgtggggaggatttgctcagaccccaggcaggcatcatgaatgcgcccagcccggaccccagactggtagctcctaccacacgcggagcagcagaggctggcaagagggactcaggacttgggctggggacagagggccctgcacagctctggggtcctgacccaatcctgcatttccatagagagctgcctgggcacccatgctgagggtccctgcaccccctggtgtatcggagacccttcccccaccccctatcccccgccactgagacacaggaatgtacaggatggctgtgagggcagaggcaggcccagggcgcagcaggcagggctgggcggggctggggatctgcaggaggttggccctggagatgggacatgtctggaccctcggtgtcatcacctctatgttttgaccactgagcaaaattacactaaatgaagcacaaattagccaaggggacagtcgactctgtcctttcttcttaatccctctggctcagggtttcccagcctggacagcctgtccgaggggaaggctgcccaagggcacacgggcatcggtccggggacattcaggcagtgaccaatccctggccaccctggtgtgtgcccggcaatgtgggccttttcccagacagccagtgggggagcggctgctgtgggtccctgagtcttagccagatggtcaaggataggacaatgatggagacccgcatgcggccgcatccatgggtaaaggaggcggaacggaggacagctctgccatcccctcagccagccatgaaaagcaaccctttcccctaaggccccagcaccaccttggaggccaccatgggctggagcccagcacagccaccatcgcatcttggctgtccagctcaggacggccagttccaaggcgtccaggctggagctctgggggcggaagagcacaagctcctgaagagcctctggtccagccctggcagcggagggccaggtgagagcctgttgagggctctgaggactccaggagggactggctgaggacaccggtgggggtaatacctccccctccaatggccgctcgcaggaggcaattcccagagccccgctccatgggccaccaggtacccagagcctcatttagaaatggccatgcctccccacaggcccccgctgggatcctggtgcttcaaatgtcctgctgtggtcccagggaggagcaaaaccccctcccagtcaggaagcatcctcaaccgcatctaattccagatgctacctcccaccttggctttccaggagacggagaacggagccggcccctctccaaggccccgaggcccggcagggcacccctcggagcagataagctcacccctgctcccaggacaagcaagctcctgctgaggctctgctactgctaattggcccttgggataagcagacctgtccaggaaagaaccctctccctgatctcctggccccagccccatccggccgggagttctgacttaagcaaataatcagtccagggaattggaggctcaacagaatcgtcctccaggaatctggtcttcgttcctccaccctcctcctcccgtctccgcccggggtcttgagatcaacagcaaggttttgcactcgtaggggcttcccggagacaccctccagcctcaacccagaggagatgggtgcctgggccgtgacccctcacacaagaggaccaagcccagagaggagacgggaagccatgcgcccggccagctggggtctgcgatggactcagtggggtccagccctcctcactccaaggggagctgggagccgacccggtgagggagggcatcctgggaaagtgacaggaatcagggaatggccctggggctccggacctcctctgatggagtcattcaaggcccttggcagagctgggcatcctctgggccccagggaataaggtcccctcactccaccacagaacagcatctgggcacctacctgttggccatgggcagagcaaaactctctcctggaccccagtgcccagagccctggccttgggagggagctgtgcatcctcaggagcccccccgggctgccccccaccaccctgcaggcagctcaccctcccaccccaccagctgcaggtgcggacacgtgtcttctccttccccaaatgctcgttctgcacctgcttcgggagggcagtcctgcctgctcacagcccagccctgcccgaactcctggccatgtgtggaaacacacgggcgttagaacatggcatcccggttcccttctatgttcaggaagacgacacccatctggctgaggggatggcagagcccctctccccacagccccctctgcagtgcagctctcctttcctctccccgcatgcctcttcccgagggcagccccttctctccatcaggatcgcatgcctcttctcgagggcggccccttctctccatcaggatcacccttcctgggcctccggggtgcaacgggcgggcgctgtttcccccaagccctcccttcctccctcggggtggggccctttcctccaggctcttctccgtctcctggtctctgccatctcccaaaacccattctatttctccacatgtctacctcgtcccccatccgtctccattctcctagtctcccgcctgccagcccggccctggcaccagccacttggcagcctcctcctcctcctcccagaaccttctctttccttcctggtcccatctcaaactgcagcaagctggtcgaaaggtgagaccaggctgggaggagctgtgggccacggagatggtggccgggggaggtatgggaggtgggagggcaggcgggccaggtggggagcagggcatcttgccatgggaagggctggaggaaacaccgcatccagggatggccagagctcgcctggagcccctgaaggtcttgcttttagagccgggtggggctgctgtgtggccaagccgggcgagtggccccatccccgggtcctgggctcctggcgtctgccctggagcccaccatgttgcagtactgtgtggccgtccattgctgctctcttcactgtatgaccgggggttccctctgtgcccctcaaagccccaacttgcctggactttgggtctgcagctggcgcatgggaatcttcccacatggcagcgtagggtgactatggagccgaccaaggctgccaaggtcttacttgagtagaagacgtccatcctgagcgatcctgttggccggtcctccggatccagccttcctgggaatgcggccacccacaggactccaagcgggtctggggtccctggtcccccaggttgaccaccccttgctgcagctgctccggaaacagagggtgctgccctggccattttgctccttgctgggtgtctgggagggctgcgaggggaggaagaagggcagggagaggtgagagacccgagagaagggggaaggagtctcaaaggaggggagggacggccggccagcactgtggcgcagtgtgcaggaggggaacatggcggtgcccggcacgaggtggggtgcggggcagccctggagccctggctgcctctcccagcagtgggtccggcactagctagccagctgagcttgctgtgtttggagtctgcagaaagtgctgccccgccaagccccacaggccaagccaggcccgagggacaggaaggagcatggggccttcactcactgcccagcccggggcacggccggcccatctcccatttccagggcatccggggacgggcacgccccggatacttactgccctgtcactggaggttagcatcctccctcgtccggtgccctgcccaggtggctgttacctcccctacctcctccaagaccctgagcagggggagaaagaaagtggacagaggcacccgacctcctgacctgagtgtggtccccgctttgttcccccttcctctgcccccagttctcactgcgaaggaggagagggctcacctggggtggccccacgtgcctgccagccttggtccaagactgcagagaagggtccctgaggaggtggggaggaacccagaggcagatcctgagggtcttccctgaaagaggagggctggtgggcagcaggaagatccgggattgtgccctcagctgccctctctgtcctgacgtgtcacccgctaagggtcatgggccaaggagggaacgggcaatgtctgggagccatagagttgggatggcccggccaggctgggtgtggggtctgttggggatcccaggtgaggggaaggaattgggagtggacctgggcccgaggcaggttgggtggctggtgcaaggcagagggctggccccgggggcattctgtcctggttcctctgtcccctcacccagttcgtgagcatccctcgtggagcaggccccagggagatcacgggcggcgggtgggcagatggagtgcaatatcccccaaggaaagtgtgttgtgaggtggtggagggcagggccggagaggccccagctgtggagcaggacgctggagggctcagggcagccgagccagggcccggggcagccgcaaagtggcactgtgttcttttgggccggaccagagcccaggcagtgtcaggaggtggatggtgtggaagagagaggagttccaggggcgcactggggggccctctgtgtggctggaaggtggaggggcgctgggtggaagggctggcttcgggctggcggcttgggctaaggcaggcttgcaggggctggctcctgaacccacgcatggcgagaagtatgggctggagcggccacagcattggggaaagacagatgggagggctggacaggaagcagggctgtggccaggccggggccccgggaggacagggacgagtggtggacgtgagggtgcagaggagcaaagtccaggacttggcccggatcgggatgctcaggaggctggggatgctcggaggaaagcaatgggggagcccggctgcctgccccacccctgccaccctcagctccttctgcccgccaggactcccaggctccatcaggtgccgcagcaccctggctgcgacataacgaggtgggacagggtcagcaaggtgacttctcgtgccccagtgtttgcaaatccccaaaatgacccaacagacaagctcgaggctggattttccaagagggccccttcaagtaccaaaggacacaaagagcaggcccttctgagtctgcggcccacagatggcaacacgggccccggaccccaggaccaccttgggcacagagcggctgggcccaggaggctggcctctcccggggatcccacggctggcctgcggggctgcagcaaacacgtgcagggctttccagagccccgcacagaacaaagaacaaaatggggagagcagggcctgggctgaacggaccacgggcgggtgggcggaggggcacagcggcatggcacccactgccaggccgagggcagctgcagggggctgggctggagcagacccggggtgggggtgggggctggaggaggctctcacggccggaatcaataactcacactgggggagggcgggagacgcttgtggcggagcggggagggggtgccggacagggtgtccctccacccccaagttcaaagttttatggcgagcaggcttgacttcctcccgcgtccctcctctccaggtgttatttgaaaaaaatacttttcaaactacatgctgaaaacttcagcatgaaaatttaatgtcagaaactctgtaatctctttcccagagataagacccagcccctcgaggaggggcgaactcgatccctctaacacagaaagcagacgccaggccgggaaggcaggggcctggcggcctcactgggggaggctcaggctcacgctccctccctccctcccacccgcggctgggagggggtgactgagagaggccctgcagggctggagctgcagggctggggcgaggggtccggcaggaggggccgtcctagtgcagcctgcaggcttcgggccttcgggaagcacatcctgccgctctcccgcgtgcaccccgctccccggaacttggagtgggtgccgctgctgccaaggctcgggtttccatgacggctgaggcccctggccctctcactcagaccctaacttaggcctcgctgagggctcaggttgtggacagctaagctggggaaggacaacgtggccaccaccgcccacggcctttctgaccggcagcgccgccctgggttgggtggcgggggcgtcctgcacacacgactcctgaggtcaagcctgggtgtgggggtcttggactctgagctgccaggcccgccgggtcctggcctcagggagaggggaacggagctgccacacacccggctcttgactcgatttctctgtgggggacagacataacttctccaagctgtttccaacagcccccaccctgaagacggcctccacctcagacatcagacaacgccccgagccccccctgcccagggccgggagggcaggctgcccggaaggagggtggggctgcccgggggctgggtgtgcgctccagacctgtgttctgggactgcattccgggggagggggtggtgggaaggcgccatgtggagcaaaccggctgggctgggggcaggaggccccccaagcggggagagggaggcgtccgaccgaccgcactgctctgctgcccccaccaggcaggccgaggccggcatccccggagaccgggacctggtggcccagcccagcactcctgaatgagcctgaggcccccgtgtcctgagaggcagggggctccctcctttgtagcggaaggagacagaggcctcctaaaggggccggacgcctgcccaaggcgctagtcgcctggaagctcccagaatgtgggtgtgggagaggccaaactgctttctccccaaaccccaaaatcctgggtgaccctgaacccgggcctgggcacttggccctgtctgcccaagccccctaccggcccccccatgtgctttgcgtggtccgagcccagcgggtggggcagggctggcttgaggctgccgagagggtttctccccaaccgtcctgccccctccaggggacatgcagagccagactggtctgttgtcctgtgtttgcctgcctctcccggtgttgccgtggtgatgacacaccaggcatggctgggaggggtcatacctcaggcagaccaagagtcctgcgtgtccaccacagacggcaccccctcaggatgcccacgccctggcccccggctcccaggccttgtcgagaatgttccatgagcctgacggacaggcacgaggtccagcgtgtgaggcccaggccgctgctccggcgcctgcccttgcatccccacagcaccccgcccagccaccctatctgtcctcggggtccccccagccgtctcaggtccaggctgctgggtgtgagaagcgccctgggtttctgctgtgtccctgccccctgacgaggagcgcttctcttcctgcacccacagccccacacagcccctccacgccccagggtcccccagccaacccagcgtcctatctgctgcttgcagctgagcctgcggcgggggaccccaggcaaatatgaggaagcctgggcagaaggtggcccctgcagaagctgctgcccacgtgcccccgccccatgctgccaggagaggctcggacctcaacaacttgggagtggcagaaatggtctctgcatgaccagtgcggccccttcttagccccttcctggggcttccggagggcctagcagcttccctggctgggggctgaggggcctccgggcggcgactcttggaaaagcctgaggtcagaagagttcagaaacggccgtgctggctgggtcctcttgactgatgtggacaactgtgtcccatctccctgagctatttctgttttcgcaggagtcaggggagggctggaactccggcttcccggcatcccggcgggcaaccagataccctcagataaagggcattcctgcaggccttcatcacgctccccgggcagctgctggcccctcaccctgcacaagtgggcacgtcctccctgagccccgagggaggctcggaacacatagtttccctgttatgtaccagctgaggggcccggtggatttagctggggtgaggcccaggggcccaggcgagcaggggatgttctcgtagggaggacagggctgagatgggaagagcagctggtcctaagccccacagggcccccccacagggtcccctcagggccccgagcctgggttttattttgggaggcaccttctagagtgtaagctgcctcatcccgcgggcacgcgtggggtcgcccaggacctaggggatccttcagccggctgtccagctccgggactctgggttcccgggaacccttgggggctgatgttctgagcatgtttgctccgcagtgttctcagccacacctgcaccctagcaggatgccagagggcttttcccagacttcagagctgaggcccgggcctggcgggcgccccctcctccagcaggacgggaaccaaccattcactcaagccacgagcaccccacgggctgccctgaagagctgttgggaggagagggtccatgatcccaggctctgaagacctctgtgcccagcagcggggcctctggagggtgaggagggatgcgtatcaggagcagtccattgccggctggtggggtttgttttgttaaaccgaaagaaaaacagcagcagcagcacagagccccggggcagctgacctcctgaagccaggcagggtgcctgggcagggccccaaaaccacagaggagccccagccagccctctggggagcagggtcaggcaccccgacagagggtgaccaggacacacgacccggcggccctgcagccccccagcacctcctcactggggaccagcctgtcggcaggaggcagccctgggggtcggggacacagtcccaaggaaggctaggacctggaacgctccttaaggggtgagacacccctggggggcagagctaggccctgaccagggtggggactgcggaggagctgagctggctccaatcggtgcatggctggctgtctaggggcagcacagagggaggtcccatcccaggccagcagtggcaatgccatctctgaaaaacggtccgtgccatgaggcctgagcctccggtgcccttgcctggcatgctctgccacaccgtggccgcgtgagggacagacagcgcgggacagaatcccacctggcagggaggtggcaggcttgccatgtgccagcaggcaccgggggaggaggggctgggtatcgggggcggggaccctcagggcgaagctcgatgttaggcgggcttcttctggagggccgtgtctcctgggcaagcattatcatctccacgttttattttattatattattatttatgtatttattgaaacagagtcttgctctgtcacccagggtggagtgcagtggtgcaacctccaccttccaggttcaagtgattctcctacctcagcctcccgagtagctgggattacaggcgcccaccaccacacctggctaatttttgtatttttagtagagacagggtttctccatgttggccaggctggtctcgaactc

SEQ ID NO: 197 - DNA, 31737 bp, Homo sapiens
gaattcaacattcctgtgtgcaggggaatataggaataccagagaacacaaaagcccaacagaacttagtggtttggttttgtttggtttttgagacagggtctcactctgtcacccagggcagagtgcagtggtgcagtctcagctcactgaagtctcgccctcccgggctcaagcgatcttcccacctcagcctcctgagtagctgggactataggcgtgtgccgccatacctggctaattgtttttttggcggagacagagtctcactatgttgcccaggctggtcttgaattcctgggttcaagcaatcctcccacctcggcctctcaaggtgctgggattacagttgtgagccaccacacctggccagagcttagtttttaattataatttgagtttgggcctaatagtctcctttgctgtggcctcactttgtccctcagtacaatagacagcatcataccctaggacactcacattcattacagaaggatgagtcagtgttccagaacaactagaaatgtaacccatgtctcatgaaaatataaggagaaaagaaagactgaaattcctatcattccctctggagaggccaggggtagtatccaatgttaacccaggctgctgtgctggaaaccggtctacctgcagactggatccgtgttagttcttgctacagactctccattccagctgagttcattcttctgtctctcacacatgatgctcattgcatgtgcttgttcatacttgcctccaaacatgtatacaggccagtttcctcctctcctactccaggtactgtttctccatcctccctgtccaactttgtccattttctttgtagatacccagtcctacctgagctcacttccaccagaaaactttcttaattggccttccctggctccaaggactgtactattctatagttcctcaacattgtattatttgcacttatttctgtgatctactgtctgcctgtgtccatggagggatgttgtgtatctgtctcaatgagcctcctgactgagagcagagctattactactgtcaccttcttcagtggattaaaatctcttctgttaaaggcctctctcttctgagagactttacactcttccttggtgtccgtggcagtggagttgtataggagcaaatgagcttgagaaagacagcagcttccatgatggagtccatgtgaaatctcattttcctataataactaggacattattgattctcaaacttcagaaaatgagttggttatctggaaatttcaaagaaatatggtgcatctcttaattacctggttttccaatatacagataataaaattagaattctgttgcttgatcttcagagccctccacggcgacaataatattgggatcaacattcttttacataacctagactgcaatctcatgggtctacttgagtttcttcaacttgttctatgcctccagacctttgcatgtgctattctttctgtctggaatgccatcctttcctcatcaacttgccaagatctgatccttcatttaaagcctagcttaaaatcttctccaagattatgtcccagatcgctctagcgagaattatttctgaccctcctgcaactatagtgtcacattgtttgagtctctattatactactagaataatatttacatatgtatttatctcttttactattttgtaggttatgagaaggtggaaattgtatatatttttttctcttctttttttcctccttattctctgccatcttgtatcaatttgaaactaactcccccaagattgtttatgttttaactgtatatccctttatattcctgggcttaacataatgccttgcataggagatgctcaagaaatataaattaatttggataatagagccaggtttttttttcttgttttcaacttttattttagatttcagggctacacatgcaggtttgttacaaaggtatattatgtgatgctgtggtttggagtacaattgaacccttcacccaggaagtgagcataatacccagtagggagtttttcagttcttaaccccctcccacctgtaaagagagtttacactcttccttgttctcccatttttatgtccatggcagcagagttgtatagctttatcaagctcatcttcattcctcagtactcccatcaactactcactctcccaccatttcagttctcctgactttcaacaaagccttttcatgctaagataaaccttccatagttaccctgtgtcatttctgatggtctgcacggctgttctgttctgtcctattcttgtgtgctcaatcctgtagcttcgttcttgccaagctctggtctattatctcctcttcctcctctggaaagtctactttaactagcttccataaatgtccttacccctcattctcccagcattgatagcgaagatggtactccagcattaattctctgtttatctgtatcttgttttccattgtatgggaaacttccccatactgatattccttttcctgttaaccagagttcatattcatccccatagcttccagttcctctagtcagagaaatcattgactggctttctcttgcttggaaagtcaaccaactttagcaagtgacaataaagagagatttagaacctactgaccctctcaatcccttccttgccctctcaggcccccctttcaacctttccttccttccacaaatgctggctgagcctgcgttatgtgctaggcgctgctataggttaccatgcttctcccctgtataaagcttatactcgatgctccttctgaatgggagtttagatattggtctgatactagaaacacttaatcaaatgctcccaaacaatgtcataagtgtgaattctgatggagtacagaattaggatatctcttctctgtaagccattctctccattcttgaaattgctattcatctttggcccatctctcagaacttgatacagaatagtttttgtgtctcattctgtgatgagcagttagtccatctcaaaaataattttagcgtttactgaagaaccccaaggagaggagtggggaaactagatagtctaatctcccactgtcccatagaaacacatacatgtgaactcacctgcaggcttatgtaattacatgttgttgaaactaaatggctaagttaaactggagtaaagaagtaatctcaattagttgcagttataagggaagactctgcaagaaaaggatttgagctgggttttgatgggagattgtgggaagcagtctgtgaagacaacactctaggtgatgagagacattcattgttcagtctgaggcttaaatgtgagaagagtcaggctatgggggttggtgaaagtgttatcttggctgaagcatagctctaagttggaaaattccaaagaaatgggtttagtgagaaattaggatgaaattgctagaggacttaaatgaccaacctaggatgtgtcttcctagctgaaggcagggccataaatagaataatttcaggagggctaaaatgtttattcttccccttagcttttgagaacaagagactaaggtttctgggactctgactttatatgactaaggtgctcctctcacatgaagtaaagcataaagaccaagtataatgtaaacctaatgtctagatttttctataatattgtttaaatttcagttgtaattatctgtccaaatggactccacactttgttttgcctcgttctattctggaatcatatgatggcctgcagaatttaacttaaccagccacatgctccttgcctcattcagcctacccattttttctgtatgaaaaggtttcacagtaaagcaaagaaacttttacacctggcatctatcccttgacctttaactttctggagtcaccttacttgaaggaaggaaataccacctagaaactgcccctggatttttcccagcctgttgtacagaggtcttccaaacctgggttatgctaactgatggcagaggagaagagtcccagccctagcttcccaaatttttatgatattttcaccttgaacctctgctggaattttctctgaagcagaaagaagaggtggtcacttttcaaattgtttatgcttttatacttttcagattatgagggggaaatattataatgtgtctacctcttccccttggcatatttagatttaaaagacaaaatatcaagaaaggaattaattttgtagagaaataataaatagaattagcaaagaagaactttccaacagcatggtttactgaaggaaactgggcagtccctctatctgaggatctagaagaatagggtcaattagcatttgtctgcagattttgaaggcagtgaaatgaatgagaagactctccaaagctctgtctgcaggccagactcagtgatatcagaacgggacatagagagaggaagcaagggtgactcaaacccatcttttaaggtctctcttccctatggttgcgtgcacctctggtttctaaaaaaatttttttttgcctcgtttgcttcagagatgggtggctttgaggaagtgaagataaaatttattcaacctagatgtgtaaatagaattttgtgaccaattttgatatgacttttatatctagacttatagccaggggtgaattttcatactggcatagggtcaactccttattcctgatttgtgcactatccactttgtggatttttgcagactccatacttccactgccttgggtttgacagaaacactgagtcagagcaagcatcagggatagactcaaagggtgtgtttgtatgtatgtgtatgagtgtaggtatccaaagataaagcaatgaggatttatttcacttctcttttctctttgtaacactaattacatttgtgaaactgtttaatggtggcctctactactagacagtaagctacatacaaggcttgtgcaccattgaatacttagcacttagcataggacttggcacatggcagacactcagcaaatgacaaaatcatgtggcctctgctctcatccactgactcagataatgagaagtgtctcctcctcaggggccagggggatgctctgctatggcaagtggaggaatcagagatgatccatggagcctgtgatatgacctccccagtgaggctgtcagccctagggtagattccttgttgactatcctcttcttatcactggcagcatcttatcacaatacttggggcacgggccagggagttacccagggctgaggatgggaggaggtaagtcctggctatcaggatagacatcttattccagcagcagttgtcctagatgtggcctgtttcccagcccactgacctttagggcacagtggggggttgggagcatgagtcagagaggaatgtgggactggttgcttgggagtttcactctctggggagaagctggttccccatgcctatcagttttctaatggcatctctagaggcagagcctagaaacaattacttgaaggagtcggacgaagcacccacactcttttgaacccctaggatgttggcaggaagataatttaaatagattttaacaggcacaggacagaaaagtattgtagagtatttcaatagaaatctgaggctgggtacaatggctcatgcatgtaatcccagcactttgggaggccaaagcgggaggatcactttagcccaggagttcaagaccagccagagcagtatagtaggaccccgtatctactaaaaacaaaaagccagatgtgggagcacgtgcctgtagtcccagctattcaggagactgaggtgagaggattgcttgagcccaggacgttgaagctgcagtgagccctgttcatgcctctgcactccagcctgggtgacagagcgagaccctgtctcaacaaaacaaaacaaaacacacgcacacacacacgctcaaaaaaaaagaaaaaaaagaaaaagaaaggaaaatttaagatatcctcttatccatacttctgcctccatcccagataaatacaaaatctctctttgaagattttctaaagtgaggggattccactgttaggtaaccatggtaaccactacaccacagcacacttatgagaacattccactgttaaatctagctgaatgtagcctgcaacatggaagccatgaccaggacagtggaagtgcagtgtgaattatccaagcaatcatttcctcattccttgggtgggagtgggcagacacgcccaggagtccctcaccctgcctcccacgatgctctgcttcttcatacagtgcacacagtggtgggagatggcagcaggggcagagaggccctcattctggagaggggacctatgaatcttgtaaatatgatgacatcagcaatgacagactcttcagccgcctggtagtctgtcattgaagccaggaattcagcacacgctcagacacacccagccttcaccatgggttcccagaagcaagttctcgcatagccactaggctgggaggaccctcacttaaccaaccctccctgacaagctccaaggcctcagagtcgaatcctaaatttccaacttagcaataattttttttaaattgcatgatgctgaggcttggggtatggatgatcccgtcacccaggtaatgagcatagtacccagtagatagtttttcattccttgcccctctccctccttcccctctccagtagtccccagtgtctgttgttgccatctttatgtccatgtgcgctcaatgtttagctctcacttataagtgaaaagatgcggtatttcgttttctattcctgtgttagttcacttaggataatggcctccagctacatccatgttgctgcaaaggacgtgatttcattcttttttatggctgcatccaacttagcaataatttttatccctctctgttttctttctcaacagtgcctaagttgttcatgctggttgttctcaggtgttttaacctccccagtgagtgagatccaagattcatggcattatcatgggaaattctttcattttggtttaactgaaatttgtttttgttattatcatcagagtctaaaactgatcaagccagaaaacttctacactgctctgaagtcccagacaaataggctggagatttttcctgctgttctccacctctctccataatgagatgctttgtttccatgaattggccctgatccagacttctagactctatgacaggacatttcatccctccctctgcctccaggcaggactgaacttaactcatcccaggctgaagggtgtctccttcagaccttgtttcaagatttcctgactctttggcctctttcaggtaaaagcgcacagctgattgccccaatgcctaatcttaatttcctaatggcaattctagctcatttcttttcattgtggaaaggaagatccacatctcccttatacctttccagctaaaattatctcagttcttttataatgcttctcagatattaatttgatcccatatcttctttgtgctagaggaggaaaattagtgttagatgaaatgcgctccattatctgagtattgttggcctgagctagtattccatatttttatcacttttgttattgtgctcctcaccaacatatctcattctttctttgcatggagacttcaaatatcagttttatctacctggaatgcctttccctctctcatcagtcttgaccttccattacttccaaatcctgttccattctccctctctagacgacgtttcctaactctgcattttctgtgtattcctgattcttctgaatcctactagtggcaatgtaaagaacttcattcagctggccttaagatctgcccttgcctcactctctccgagtatgaagcatggataagaagagttctgagagcttgcagggaaccagtagcacagcgtagtgggatgtatatagcaagtcaagaacttgggagttctagtgtgggtctataaccctgtgcacctcataacctctctggcctttccacttaattatgtatggacaaggaagcattgaattaggccatctcaaagaattctttaactttaaaaatgttgtgaatttgtgctttcctctctttcttggtctctttcaatatcatggacagaactctacaagcagagaaatcacagaataggagaatatgaactaaaaggcatagtcgatagggaaaaacttcattttaatatggaggtagtgctggtcataataattggaaatttgtagtgagaatgggggcaggctgctgcacctccttaacctcttgcaatcttttttttttttttttttagacggagtctcgctctgtcacccaggctagagtgcagtggcgcgatctctgctcactgcaagctccgcctcccgggttcacgccattctcctgcctcagcctccccagtagctgggactataggtgcccgccaccacgcctggctaattttttgtatttttcatagagacagggtttcaccgtgttagccaggatggtctcgatctcctgacctcatgatctgcctgcctcggcctcccaaagtgctgggattacaggtgtgagccactgcgcctggcctcctcttgcaatcttacaaacattgctgtgatgtgttttaaagagtaaggaggctgggcgcagtggctcatgcctgtgatcccagcactttgggaggccaaggtgggctgatcacctgaagtcaggagtttgagaacagcctggccaacttggcaaaacctcatctctactaaaagtacaaaagttagctgggcatagtggcacatgcctgtagtcccagctacttgggaggctgagacagaagaattgcttgaacccaggaggcggaggttgcagtgagccaagattgtgccactgaactccagcctgggcaacagagccagactctgtctcaaaagagaaaaaaaaggtaaggaaatggaagtggctctggcctaatttctacctcctcagcacagtggccatcaggcatatcctagcaatatgcttgtactaatgtaaaaagcttgctccaccctcattcaagtcactgaaggaagatcctacattaagttgttactcatttctttcttgggaaattcccaagtcctatgtgagtagagaagaacatttctatctggagtccaaaagtcttcattttctaaatagaacttaagtttgttctatgatatgttggtcattatgcttcataacaatccctgaaaataaagactgtaaaagaagtaatttataaggttatgtggtcgtgtgtgtgtgtgtgtgtgtgtgtgtgtgtgtgtgtgtgtgtgtatgagatagagagagacagaaattcatgtgattttcactgtggactagaggagtcttagagaaatgtcatactgaccatgccacttactctaagcagggatagattcacatgttatttattttgaatcacattatcttaagcatctggacaacttagattttattcaaagctgaagagctagaggagagaggggagggaaagtaagtatagggtatttattaaatacctactgtatgttaggtattgtgaaagactttatatatcatatatactcaacataaggtgagattttatcttcccaagctactttctcagaaaagaggaagttattttatatttgaatccttacaaagtcttatattatagggtactttctcaattgctttttaaggaagacacattagtctgtaaaagcaaaaagcaaacaacctcttcacccccaaacaaacaaaaaataaccagtgagggtttggattacctatagaggccatttgatgggatttttttttttaagtggacttcagtttctgggaatgtgaaaggcttgggctgggttatttgaatcaacgttcctgctgaaaatagctttaaaatgctggataaaatagttaagacatcttaaaagcatgaaagagccaacaaaatagtagggaaatatcaggtcaaaatctagttgaaagtgaaaactcaaagtgataagtgaaacaaaaaggctacttttaaccagaaggtatttgctgatagaagcaaacttgcactctggttttgatggctggtctgagaacttcaaactcatggctggcccgaagttaggaatctaataggagactgaccccatataaaactgaaaaatcaaagagttatacccttagtgtaaggtgaaatagaagtaaacctaggctgggcatggtgggtcatgcctgtaatcccagcattttgggagatcaaggtaggaggatttcttgaaccaaggagttcaagaccagcctgggcaacataggaagacccagtctctacaaataacaaaatcagctgggtgtggtgggacacacttatggttccaggtacttgggaggctgaggctacagtgagccatgattgtgccactgcactccagcctgggtgacaggatgagaccctctctccaagaaaaaaaaaagtaaacctaccccctctgccacatctccaagggactataagaaagtttccttggtgctgagcagagcagaaggaaaaagtccaagccagcctgatttgcagcccaaatttatatcatctaggtagtaaaagaaaacctcaaaccttgaatttaattttaaatgattccagattagtatttcctttggggacctagcaaaagcaaaggcaaatcctccctcaatgaagacctctgcatcctaagcctcaaaaatctccacaagtaattcttcaaaggcagtgagcaaataagcacatagggagagaaggcaccgtgagtaagaatcagcaaaaacaacagacagcagaaacagatgcacaaagcctccagagattgaaactacctgtcaggcacatgttaaaaaacaagcctgaaaatatttccgggaatgtaaaaagtgatctaatggatttaaagcagaaccaagtagaatgattctaacagcaaattggacccaattgaagagataattagtaaattaggagacagatcaaaagaaatccagaatgaagcacaatgtggtgaaagtatgaaaatatcaaacagagttgagatatatggaaaatagagggagaagacccgtatcaaccaataattaaggctccaaaattaaacaagacaaagaatagaacagaggcaatgtttgaagaaataatgacaggattttcttaaactgattaaagtcacccagaagcccagtgaattccaagcaagataaataaataaaaaaaataaatccaaccctaacatatgaaactacagaacatgaaatatgaagagaaaaataaggagataagaaaaaagataaaaataagaaaaataaggagataagaaacttctgcttctggtcacaaagaagtaactgacatgaaacttgtccttccatcctaaacaagtgctatatatatgaaaatatatatatatatatatatatatatatttactgaatgggtttaataacagatttgacactacagaagaaaagataaatgcgcttgaagacatagaaagaaaccatacaaacggaggcatagatagaaaaaatactgaaaaacaaaaagaaggcattaatgactgcagggacaatatcaagtagtttaacatttatgtaataggattaagaaaattttgatggaataatggatagcttcccctcaatttaataaaaactataaacctataaatttaagaagctcagtgaccctaggctggctaaacataaagacaactacaccaaggcacatcataatcaaattgctgaaaaattttaaagtagctagggaagatatattaaatataagggaacaaagataagaattattagacatggtttgtcagcatcaatgtaagccaggagacattggaagaacattttttttttcacctagcaaattagcaatttttatttctttgtttcgttttattttattttattattattatactttaagttttagggtacatgtgcacaacttgcaggtttgttacatatgtatacatgtgccatgttggtgtgctgcacccattaacttgtcatttacattaggtatatctcctaatgctatccctcccctgctccccccaccccacaacaggccccggtgtatgatgttccccttcctgtgtccatgtgttctcattgttcaattcccacctatgagtgagaacatgcggtgtttggttctttgtccttgcaatagtttgctgagaatgatggtttccagtttcatccatgtccctacaaaggacatgaactcatcatttttatggctgcatagtattccatggtgtgtatgtgccacattttcttaatccagtctatcgttgttggacatttaagttgattccaagtctttgctattgtgaatagtgccgcaataaacatacgtgtgcatgtgtctttacagcagcatgatttataatcctttgggtatatacccagtaatgggatggctgggtcaaatggtatttctagttctagatccctgaggaatcgccacactgtcttccacaatggttgaactagtttacagtctggaagaacatttttaaagtactgaatgaaaaatatgtgccaacctgaaattctatgtccagttaaaatgtttttcaaagtaaaggttaataaagacttgtttccacacaaacagaatccgaatgaatactgagtgctaaagggagatttttaggttgaatgaaaaggatattgaatagaaacttggacttataagagtttcagaaatggtaagtatatgggtaaatattaagactttttcttgtttttaaattttctttaaaagttaacaggctatttacgaggtgggcagatcactttgagcccaggagttcgagaccagcctgggcaacatggcaaaaccctgtttctgcaaaaaatacaaaaattagccagacatggtggcacatgcctatattcccagctactcaggaggctgaggtgggagaattgcttgaacctgggaggtggaggttgcaatgagctgagatgatgccactgcagtccagcctgggcgacagagcgagacgctgtctcaataaataaataaataaataaataaataaataaataaattttaaaggaaaaaaagttttaaaaaaggataacaagttatttaaaacaaaagagaaagcaatgtattttggggtttataacatacatagcagtaaaatgtatgacgataatagcacaaaggagatggaagcaaactattgtccctactttgtatgtgacagggtatattatttgaatataggcattgatagttaaagttgcataatataaatcccataaaatagtcaataaaataaccaaatgaaaaagtatagctatcctaagacttattcaatccaaaagaggaatcctaaaacttactcaatttatccaaaagaggaaagaggaaacaagggatgaccagacttaatgtcaactatattgataattacattaaatataaatagtctaaaccttccaattaaaagctagaaattgtcaaatagaataaataagcatgattaaacaatatgctgtctgcaggaaatgcattttaaatatttagattaaaagtaaagggtgggaaaacaggtagcatgcaaacataaataataagaaagctgaaggtgctatattaatcccaggcaaaggagacttcagtacatggaatagtaagacagataaagagggacatttcataatgataaaaggttcagatgatcaaaaggaaataacaataataatagtaaataattggcaaattacagaacatcgaaatacatggagcagaagtgccataactataaagagaaatagacaaactcaccattagaatagattttaaactctgttctctcaggaattgatagaacaagttgtcataataccactaaagatttagaaggcttgaacaacataactaactaacttgattgagtcttccttcatagaacattacctgcggtgattgcagaatacatgttattttcaagtatatatggaacagtcaccaaggtaaaccattttgaccataaaacaagcattgctaaatttaaaaggattgaaatcatatagagtatactctgatcacatcagaattagattaaaaacctaaccaaaagtatatctgaaaaattcccatagtttagaaaattaaacataatattcctaaatagtccatgaaacacaaatcacaaggtaaaatagaaaatactttgactcttaaaaaaacaaagcacaatattttaaaatttgtgaatgtagctacggaagtatctaaaagaaaacctatatctgtaaatgtttttgttagaaaagaagaaagatcccaaatcaattatctaagattccattttaaagacttataaaaagaagcacaaaatgaagcaaaagtagaagaatgaaataataaaaattagggtggaaatcactgaaataaagaacagaaaaataatagatagtcaatgatatgaaaagcagtatcactgaataaattaacaaaattgataaacctctagttagaaagattataaaaagcaaagaagatacagcttacaaatatcaggaatgaaaaaaggagataccatagatcaacaggctttattttattttattttattttattttatttttatttatttattttttttttttgagacagagtcttgctctgtcgcccaggctggagtgcaatggtgcgatctctgctcactgcaacctctgcttcccatgttcaagcaattcttatgcctcagcctcccaaacaactggggttgcaggtgtacgccaccatgcccagttaagtttttgtatttttagtagtgatggggtttcactatgttggccaggctggtcttgaactcctggcctcaagtgataccccgcattggcctcccaaagtgctgggattacaagcgtgagccaccgtgcttggccaattcaacagactttaaaggctaataaggaaatattatgaacagccttatgttaataaatttgacaacttagatgaaatggataaatttctgaaaaacacaagtcgccaaaactgacatataagttgaaaaatgtgaacaactctagctctattgaaaaaactgaatttataattttaaaaccttcccttgaagaaaaacaccaaaccaagatggcttcactggtgaattctatcagaccctgaatgaagaaatcataccaatcctgcagatttcagaaaatatgagaggaggaaacacttcataactcattttatggtgccaaaattactctgacatcaaaatcatacaaaaacatcataagaaaataaacgtgtagtttaatatctatcataaacacagatataagaattcttgatatctatgtatatatttattatactttaagttctagggtacatgtgcacaatgtgcaggtttgttacatatgtatacatgtgccatgttggtgtgctgcacccattaacttgtcatttacattaggtatatctcctaatgctatccctccccgctctccccaccccacaacaggctccagtgtgtgatgttccccttcctgtgtccaagtgttctcattgttcaattcccacctgtgagtgagaacgtgcagtgtttggtttttgtccttgcgatagtttgctgagaatgatggtttccagcttcatccatgtccctccaaaggacatgaactcatccttttttatggctgcatagtattccatggtgtatatgtgccacattttcttaatccagtctatcattgttggacatttgggttggttccaagtctttgctattgtgaatagtgctgcaaaaacatacgtgtgcatgtgtctttatagcagcatgacttatattactttgggtatatacccagtaatgggattgctgggtcaaatggtatttctagttctagatccctgaggaatcgccacactgtcttccacaatggttgaactcctttacagtcccaccaacagtgtaaaaatgttcctatttcttcacatcctctccagcacctgttgtttcctgactttttaatgatcaccattctaactggtgggagatggtatctcattgtggttttgatttgcatttctctgatggccagtgatgataagcattttttcatgtgtctgttgtctgcataaatgtcttcttttgagaagtgtctgttcatatgttttgcccactttttgatgaggttgtttgtttttttcttgtaaatttgtttgagttctttgtagattctggatattaccctttgtcagatgagtagatggcaaaaattttctcccattctgtaggttgcctgttcactctgatggtaatttcttttgctgtgcagaagctctttcgtttaattagatcccatttgtcaattttggcttctgttgccattgcttttggtgttttagacatgaagtccttgcccatgcctatgtcctgaatggtaatgcctaggttttcttctagggtttttatggttttaggtctaacatttaagtctttaatccatcttgaattaatttttgtataaggtgtaaggaagggatccagtttcagctttctacatatggcaagccagttttcccagcaccatttgttaaatagcgaatcctttccccatttcttgtttttgtcaggtttgtcaaagatcagatagttgtagatgtgtggtattatttctgagagctctgttctgttccgttggtctatatctctgttttggtaccagtagcatgctgttttggttactgtagccttgtagtatagtttgaagtcaggtagcgtgatgcctccagctttgttcttttggcttaggattgacttggcaatgcgggctgttttttggttccatatgaactttaaagtagtttttttcaattctatgaagaaagtcattggtagcttgatggggatggcattgaatctataaattaccttgggcactatggccattttcacgatattgattcttagtatccatgagcatggaatgttctcccatttgtttgtgtcctcttttatttctttgagcagtggtttgtagttctccttgaagagatccttcacatcccttgtaagttggattcctaggtattttattctctttgaagcaattgtgaatgggagttcactcatgatttgactctctgtttgtctgttattggtggataagaatgcttgtgatttttgcacactgattttgtatcctgagactttgctgaagttgcttatcagcttaaggagattttgggctgagacaatggggttttctagatatacaatcatgtcatctgcaaacagggacaatttgacttcctcttttcctaattgaataccctttatttctttctcctgcctgattgccctggccagaacttccaaaagaattcttaataaaatattaacaaattgaatccagcaaagtcagtttaacatttgactatcaatcaatatatttcaccatataaacaaaaaaatggagacaccatgtgatcacctcagcagattcagaataagtacttgacaaaattcaacactaataattctccagactagaaatagaaaaaaacttttctcagtctgataaggagcatctacagaaaatctacagttaacatcatatttaatggtgaacactttccccctaagatcaagaacaaggcaaatatgctcattcctacgagttctgttcagtgttgtgctggagatcctagcctgtaaactaaggcaagaaaaagaaataaaaatcatacacagtgaaaagaaaaaagtaaaattgtttttatttgcaggtaacatgattgcatatatatataaaatccaaaggaatctagaaaaaatctgttagaactaataaaattagatatgttgcaggatataaggtcaacgtgtggaaaaaatcaattgtattctcatactagctatgaacaattagaaagtaaaaagtttaaaactactatctataataacatctaaaaattcatgaaatatttaaggattaatttgacaaagtctgtgcaggacctgaacactgaaaacaacaaaacaatcaaaattgtcaaaattattttccaattttttattgtgtaaaatacatataacatagaatttaccatcataactatttaaatgtacaattcattggttttagataaattcataatgtttgttttaccaccatctccatcatccatctccgtaactgctttcatctataaaactgaaactctatacccattaaacaataacttcccatttttcttctcctccagcccctagaaactaccgttctactctctgtttctattattttgttggccagttttggataaaggcgccaaggtatttcaatgtaggaaaggatactattataacaaattatgctagaacaactagatatccatcacaacaacaactttgacccttacctcacatcatagacagaaattagtttgagacagagcaaagacttttctagaataaaacatagaaggaatcttcacaacattgggataggtaaaaatttctgagataggacacaaaaagcaggatccatgaaatttttaaagtatgaatttgattttgaaattaagaacttctgctctttgaaagagacttttaagcaaaggaaaagacaacacaagaccatgacaaaaaatctgtctatctatctatctatctatctatctatctatctatctatctatgccattctcctcagcctcccgagtagctggaattacagccacctgccacacccagttatatatacatatgtctctgacaagggacatgtgtagtcctttgcacagacaaagaactcttcttacaagtcaacaataacaaggcaaactaatttaaagatggacagaggctgtgaacaggcttcacaaaaaagatatgcaaatgtttaataaatgcataaaaagttgctcactacctttagtcatcagggaaatgcaaattaaagtcacactaagataccactacacaccactagaatggctcaaaataaaaagactgacaataacacatgtcgatgaaaatatggagcaactgaaactctcatacacttctgatgggaatggaaaatggtacaatcactttggaaaatagtttagcagtttcttgttaagttaaacatacacttgttgtaaaaatccagcaattggcttcctaggtttttacccaagataaatgaacacatatgttcccacaaagacttgtacacaggatgttcatagcaactttattcacagtagttaaaaactagagacaacccatatatccatcagctggtgaatgattatacaaagggtggtaggtacatataaaggaatacttttgagcaataaaaataataaattaccaatacatgcaactttagaacactggagagcatttattcatatttgagtttcctcacatcctttatatgttagtctattagggttgttatcttttcttatttattaacatgagaataaatagaaataatagaatagagtaggataatagaagtaataggataatagaaaatgggtattttctattcagagaatggttcatgaccagcaatattggcagtacctggagcttataagacatgcataatcttggatcctgtcctgaacctactgattcaagatccacttttaaacaagatccccaggtttttcaaatgcatactaaagtttgcaaagtactggtctaggtaaagtcttttatgaaatttaaatattacaactttttttttttccaatctaccatctttctgttaattttacttatgcattcttcatgttctttattggaaacaaattcttatttgatgaaataatatttaccaaaacttttttattttttcaccttttctgtttcttatttgatagacggagtttttagaagttcctatggtttttcccttgacttaatagccatattcttgttatttacccctttactatttcttaaatatggcattatctcagatcctaacaggacaagttctttagcattctgttggatctcttgttttccatactcattcctctatcatgttgatattgtctggatttttagtttatagtttcacaggtataccttttttattttgtttaattctagctttttaaaaaacaataaactttatcaaaatacttaatcacccttcctttccatgtctccttactgggttacttttattggcgcgatcttggttcactgcaacctctgcctccccagactcaagcgattctcctgcctcagcctcctgagtagctgggactacaggcacctaccatgccctgctaatttttgtatttttagtagaggcagggtttcaccatgttggtcaggctggtcttgaactactgaccttacgtgatccacccacctcggcctcccaaagttctgggattacaggcgtgagtctttttcctctcaaggtgcggcctttttcctctaactctttaaagattctactccattgtttctttcatcctatgttctattgacatctaatgtcagcttgatgcttattccttaattagtaatctactctttctcccttaaaattctctatttgtctttgatattcttaaaattcagtataatgtatttaattgtgcatttttgctatctgttttatttggccctgtatgagcccttccaatctaaggtctttcgtctttaattttggagagtgtttcttctttgtttctttaaatattttctcgtccacttttctctcctggggcttctattgttagactgttggacctgctatttctaacctttatagcctttagattttctttaaattaaagaaaaaaaaactctctttattctttcctgctacctactgtggaagcctgttctttataactactcatctttgaatgagataagttttccctgtatcactattcataggaagactgagtggttgagagctcggagttccaggctaagagaaatttttcttatgtctcaggtttatttatgaattttttcctttatatttccccagccaatggatataggttgctgtaggactagtcgagaggcaaggtttatcttctccctccatcacactgctttctgaaaatacgcttgtttgtgtaattccttcagctccacttcttttgtttctctgaagcaaagtaggtctaggaaagctcttgctgcaagcctatacaccctgctgtgagagattttggttttgtattgaagatgtgctcctagaagcagtgtacctactgattctttacatctgcagctgggtgcatcctctcttctccccagtcctgttcatggctactccttttgatgcctttctatctctctcttggttcatctttcttgtagcttcattgaagatttctcattctccttgtcattttttaatttttggtgatttacaagaggagaaaaggaatatgtcatttttatactgccatcttcacgttgccgtcttcaaacaggaagtctaagccatcttagaaattcttgtattttcagcttatagcaattatttcacggtaatgagttctattagtctgctaactgaatgtaaaacagtttattcatttgtttcaaaatgtgcctctcttgttccattatttcaggattggcaaatactatatttacccacaggatagccatcttgaatttaaatattttcactatatcctaccctccaaattttatctttttacataaagatcactattgtcataagccagccactcaatcctcttccatgggctatctctaactttattatgtgtcttaaagagaagaatctaaaactgagttcattaacctatgtgtggccacaccattgtcttgtacaaagtcacccctgaatattggtttgtgagcattctagtattccttgctgccaatgccaaagagcagagctctgccctccaatgacagatgacagtgatatttaaaaaataaatcaatgaaagtcattccttgccttctggaatctcccattctaaagtctagtttaggaaagttctctcactctctctgatacacacacacacacactaccaccaccatcaccaacaacaataaaaggcttaagaacacttaataatgtgtaaaaagtggcaaagtagcaaaacgaaactatatttgtaactgctgtggagtcacagagcagtagcattgtcactgttgggttaagggaagtctccctgcaaataggaagttttacgtggagtttaaacaaacgatagtttaagtcattgctgggcaatttattagctatataatcttgagcaaaatgactggtctttccaaaaaccagttaactaactctgtcataaaatagtatccgcctcaaagagattttttaagttaactgagatgacacatgcaaaacccttagcacaatgcatggcacataataagtattcaggaaatctcagctattattatttttataaggagagaaattgagttactgcagaggaggtgaacatttttggcatgaaggcctgaggttttgcatgaggatgtcatgtatgaaagagaggaagtagagtacataaaccagagaagagattccatttagaaagccattagatggaggtgtggtggtgggtgggagtggtgaggagagggagctgtacaaacgatgaattaaggccaagtggaagagctttaatttgatatgatgaacaacaatagctaccgcataacaaggggaccccgtgaaagcagctttcacggattccctgggactgcattcctcaataaagtattatcacataaatttttacttctggctttaattcttagggaaaccaggccaagaaagaagaataaactctaagaaatactacgatggaggaatgaggacttggtagtggtgtaactgtgtatggcaaagattagggggaagtttaaagattagctccaagtttgtgggcctggggacctggggatggaggtggagtgaaggtaattttcatagtggtgaggaaagggggaagttaagaatcagccctagtgctccttacggtatgagaggggcttgtctatatcccaaatatatggtttaaaagtctctgggtctcctgggttacagtcctcaccctgtatccccttatcactctttgataggtctacatttaatatgaggttgggacaatctgagtgtgacccttaattattttatggcataaggtttaataaagaggaatccagtcaggatgacagacttatgaaatcattttccaaatctttattttaatatatagtttaacaacagaaaaacctaaacacaacactacgagttattttagaaaaaaaaaaaaaaaagcagactaaagtagcaaaggcatctgtctaaattggctgtaatgagaccaaagaacccttctaaagcagatacaaaaacaaaagcaaggactggagtgtgaaggagaaggtttctctgggaaaacatttgaaaacctttatttccaagcctaccaatcaataaatattatcccccattgtgaatgaaccccatatgaggctctctgcaggtggatactaaagaaaccccaggcatcagacatattctcagagaacatgaaatgtggtaggaggtataggcctcatgagaataaactaaatcaggatatttacacagatccatcaagtccagtacagactgaagtatgcagctgctgtccacccaaagtagctcaaattttacgtgctcaaaagtagaactcacctgctctttcttttgtagttcctatttcagttggaggcatccagttgcttgtgccagaaacctggttaccattcttgactccttcttctctatcattatttgaatgaccaaatactatcggctttaacccaaatgtttttcaaatctgcctctaggggaggcagcctttgtaaacagcagtgtaggctaacattattccagcttagatatctatggggaggaatctctttagactcaaatttcttatctaagtgagtgaaatacaatgactgtcagacctaacaaaatcaggaacttgtctgcacccttccatctctgggaaattgacatggactcctaaagattgctgtacctgtcaaaccaaatggcagatagaaaagatggggcctgttggggggtagaggcaaggggagggagaacattaggacaaatacctaatgcatgcggggcttaaaacctagatgatgggttgataggtgcagcaaaccaccagtcacatgtatacctatgtaacaagcctgcatgttctgcacatgcatcccagaacttaaaataaaataaaataaaataaaataaaataaaataaaaggtggttgaggaccccaagaaccctacataatgtcaacagaaacacattttattggacattcttaagtcttcctatgacttggtactgcatgtgctaatcttgggaaagtcagctgccagaactttgggaagcagaaaattggatacatgagcttgattattcaaataaatgatttgatacctaaattatctggataattgcctccttatggtctaggacaacctgaccccccatactcctagagccacaggaaatctgagagtcataattgcctgtgggaaactaaatagagtgtctgagggggtgtctgcagagtaggaaatgaaaaccgattgttcaaagtggcaaatgagtaacgtgttcattgtgacaggtagaaaatcagcccaggctgggagtaagtcgggggagtaaattttggttggtgtctgacaatttccttatcctgtctattttttaaactttggttgattcattcccaagtaaccctcatccagtgttagtttcttgtttattctatgctcacatagcaccaggggactgtctgtaccacatatttgcatttatttatatgctgctttgtaaatgtttttaagccctttttctatatgtgtgccatgttttctgaagtggatttatgttctctgatgtagtctcctcaatagtcatttcccactttcctctcatctgcattttacagctctgttcgtttgatgttgtctcataaagacctccatgtaacttcttaatacctttatctacacttcgccctccttctgctgttgagtaaaagtatgaaagtgatgctgcatgtgcagtcaagatatagtacacctgctattaggtttccgctttacaatgatctgctttaagacaacaacttgagcaactctgcatctaaaagcctggattccttgtgcatactttgtgtcattgtccatgatgcacaacgagctgagccccttcctgttcccacataacaacatggactttgccctactctgcttggaaacccctttccccttctgcacttgggaagtcagcaagaaactcatgcttcaaaccctagctcagagggttgagaacctagctcctctcccaggcaaatattcactcatctcatctgctcccagaatgctttttacaaacattttctaaggcccatgcccattttataattttgttttgttttcacatcggtcttcaccaaaatgcatacttcaagaccacagcttattcatttttataaccatattaccaaatactgcagctgtcacacaatggatactcataaaatattggagaataaatattcagggaataagttcttgtgtagaatgttgatagttctctgctctatattcccatccctcgaaggagcctgccaggatgaattcttccagcttcattcttcatatgccttctctgcctcaagaaccagtgtcctgctggtcccagtccatccctgctgtcatcccaactcttccattaattggcagaggcagaatggggccctgaggtggtttaaataaaccatttgttcatttatcagatatttattccagtatttgtctcaatatttatttcatgtctaccctgtgccaggtgcagtttgttttacgtgctgttcatataccagttaacaagatagtcaaagtccccatcctcctgatgcttatattttaatgatttagtttggaaagtgagctgatggacagattaaaaatggaaaacaaagctttttgcctacattgtctgatcaattcaattcaaagctatataaatcttcatttttccacttgagtttggtaattgagtcctatctgcatgtgtctttctgtagtcatacttcccagaaaaaaaaaacaacatataccatggccacacttgcccctagcacctatgccatgctataggtagacacatacacctatacatatatacacatatacacagctatacaatgtatacactcactgatcatccattcacccaaatatcaaacctcccaaggtataaggtatgccaccttcccctccactaatacatatccattctgatgcatttctttccttcttttcttccttccttcctccctccgtcttctttctttctttctttctttctttctttctttctttctttctttctttctttctttctttctttctctttctttctttctctctctctttcttcttctttctttcttctctctccctttctttctttcttcctccttcctcccttcctttcttttctttctttctttctttttctttctttctttcctttttctttctttcttttctttcctttcctttctcttttcttttctttcctttcctttctcttttcttttctttcctttcctttccttccttccttccttccttcctttctttctttctttctttctttctttctttctttctttctttctttctttctttctctctctctctctctctctctctctctctctctctctctctctctctttctttctttctttcgtctcactctgttgcccaggctacagtgcagtggcacaaacatggctcactgcagcctcacctcctgggctcaagcgatcctcctgcttcagcagcctcctgagtagctgggaccacaggtttgtgccaccacacctggctaattttttaaatttttgtagagacgggatctggccattttgctcaggctggcctctaactcctggcctcaagccatcctcctgcctgggcctcccaaagtactggaattacaagcgtgagccactgcacctggcctggatgcattttctaatgcatgtgcatgcagatgcacatagaacaaacatgaccacacacacaggcacatgtgcatatagtggcagttagaaaaacactttcacagagggcctaatgataacttttatttctttgtgtgtggtgatttgcaatttctaaatgttttcccatccattgaactcctttgatcttcctgccaaattctctaaggcagtctatgcccattttctatttaaggaaactgaggatgagcaaaaaaaagagagagaaagagaaagatctgtatttactgaagaaatgactacagcatgcacgcatgcatacacacacacacacacacacacacacacacacacacacaacctgggcctggtcatggagctatgcatttttgcacatatcatctctgtgaaatatcattttacccatcttacagatgaggtagcatttgaactatatcatgaaacattgcacggacccctattttctcacgagtccagcaaattggcatttaagtcatcccagatggatggctattataagggctgtcctaaggggtaccaaagaggagagttttttccatcaggatttttttttcctctaactcagtcccagcctctgtagcttcattctatttccttgtggtttttacttcctcagaaagaatgaagcacagctgccagttgtcctctgaataactcttcagagatttgaagcctgttatgctgttgaagacaggtatctcccagttcccatcacttcatgttagagtggacttaataattaagtgttcctcagtaaaggctcaaagccataatgtaaagagcaccccctctttttcattatcttgacgcaaagacatgtttcacacaggtcagataaccttgcaaaaatctactggcctgcccaccaatgttgagtgtggatttgtataaatagtcatggaggacagaaggcttgggacccagttttcagcatcttttatagcacgcctccctgcctttcacatcctagacttctcccccggactttccttgcttctctccacagatctaagtttaccccttttccccgctctttcctgccgctccttgtaaagtacacacgcagaggcacacacatggaatcttgtccatggcccatcactttggtcctttactccctgacttggtttttctctatttagtttccttacatctttctagcacttaccttggagctcagcaagctgcctcctggttctgtccttgtctctctttgctgtggtctctgcttcacgagtgctttccaatctcccccatggtacagaactctcccagtgggaagggactatatctcctccttttgaattttctccctattccctgaacacatggtggccatctcagaagtgactgacctacacaagatgtgatgatcctccaagtcagtggattttttttacaagttttattttgtttttaattgtcacataataattgtacatattcatggggaacagtgtgatgtttccatacatggatacatcatgtaataaccaaatcagggtaattagcagatctttcacctcaaacatttatcaagtctttgtggtgaaaacatccaaaaccctctcttctacctattttggagttatttcttaaattcctatttaaggccttgctctagttttggatatgaattcagctttagtaaagaacaatttttcatgcttatggcattagctcaggatgacagagaaagtgtaagagaggaaaaaaatatgattctgtggatgaacacaatttcttgggccaattaactgagacagttaacacgtttattatgtttaaactattcagtgattaatttagggaattttatagacagtttaatactgtcccagcataaggaataagccattttatataaaagaagagagaaagaaccctgagatatatctacctctgatgatgaatattacaaatgaaaaatggggacattagaaatttttctttaaattgtatagttcagaatgaaggtacaaatagtcaacccccaaatgttggggcatgtatattacctctaggaaatttaaaatcctgatttgaccattttttgcccttcagcgtacaccttggcttccctaccctagtcattcccaagttgacactgcaaacactttccaatgaatgcttatgtaaaccatatattgctaaggcaactgcttgggcaaaaaacaaatttaaaaactagtctgttgatctctgttttttttattgtccactgtaattttattggccaggatcaatagttgcctgggtttaaaccaagaatatttattgagtgcctgggataggtatggtagaggtggcaaggtgaggtcaacgcaagacattacaagaactaattgtgttacttgaagtggatgtggctgtctggatcatctctacacctactctatttactgcctgaaatgcccattctgccccacacctcatggttcagtcttgtttacttcaccttttctattctctggttttcccacctgtaccttttcaggactgctgtacatacatgtacatgaaaaacaaacaaacaaacaaacaaacaaaaaacctcatttcctccttcccttcctcttttcctctcttttggttactagatgcatatgtgtggtactaaaggtgccttctgatgttgtcaactcggtcatgcaattggtcattttagtggagagtccggtgggggagtgcttccatgaaggggtcacttgatcaggtagcccagtatagacataccatcagcttgttctctgcatgcatttgctcctattattctgtctctctgtaatcattcatctattcaacaaatatctgttatatgcctactatgtgccaagaattctactattcctgtgttttaatagtgacatgatattgctgtttctttctgattaacagatattttcaaaggtgaatgaagaaagctgtattaggaaaactgttataagatgaagttgattttttttctgatctctgaaggcttttattagtgcgaggggggcaggaaaggaggaacaatatagctggtcagagattcctttctcacactagctcctgccctggatagcagggcagtgggtgggaggtaggggattgcctacagtcataatcccccccacaaaccttcttaccctcattttcttgccccagggccccccaaccaaaagggagtctgtcactgtaattaagcagtctgtaatcaacaaagtcccattaagaaataatgaggccagtaatgcagtgggtgccattggtgggggattagtgaaactcatgtggtttcctgcaactctctcactttctgaggaagtgttggggagaggataagtggataaattgttgactcagcactattagcattagtccctgcactctcccccatactctccagttaaacaccttgctgaagttggttggatgtgttgggtgggacattgttcccagctctgataaaggcatgcatgtgagttccttgctggcagggttacatcatagtcatctctgcattcccagtgcctggcacatcataagtgcccaataaatgttccatgaatgccaggagagggtgtgttagaagtacacattgagcctaaaacccaaatgtcccaccttcttgcttaagacgttctcaaaaagattgtggctccatgagcgtctgggtaaatatgattgactgaagaggatcttggtactaaggactttaagctcttttcacactctttgcatattgaatcttgcctttgttttaattacctatatatgagggcataagttcttggagggatatgaccattttatatacttttatattccacagagtatatgtcgggtgtaaaactctaatgtatattttgcagcggcaagtattgaaactagacatatggaaaagttgccgtgccacaaagtcaatgccaaaggtccccagaatacacttttctattaattttagagtccagtaaaatagtaaaagctaaattgggagggaactaatcaatctggagttgtgcaaaatgcattatatgatctgtgtcaggggagcttgctctgcatgaaaatgtagctcattcaccttcctaacatgaatcctgtggcgtctaaagagtcttacatgtggccaggcatggtggttcatgcctgtaatcctagcactttgggaggctgaggtgggtggatcatgaggtcaggagttcgagaccagcctggccaacatagtgaaacccccgtctctactaaaaatacaaaaaattagcctggcctggtggcatgcacctgtagtcccagctacttggaaggctgaggcaggagaatggcttgaacccagaaggtggaggttgcagtgagccgagatcacgccattgcactccagcctgggcaacagagcgagactccatctcaaaaaaaaaaagaaaagaaaaaagtcttacatgtggaagcagcagaatgatctttccaagtgtgtttcagcccaaggcccctgggagc

SEQ ID NO: 198 - DNA, 4283 bp, Homo sapiens
tcccagtctctgtgcgaggcgtgaagcgcggacctttcaacaagggctttattaattctcacgctgcggccctggaaagcgatggaggtggcggctaattgctccctacgggtgaagagacctctgttggatccccgcttcgagggttacaagctctctcttgagccgctgccttgttaccagctggagcttgacgcaggtgggaagcggcggcgcccttcgtactccgttcctttcccctttcggctgcctccggcctgacccttcccgcaatttctttctttctgactggcaagcgaagccaccgtggcggcttgcgtggactcacggaggccgctgcttctggggaatgatgcccatcccagaacccggtgggagccgccttcgcgcgctcttcggtaacgggaccctgggccccctccgtcagcagcccagcctctgaggtctgaggtctgagggctggcgtgcgggtagtgcctggggctctggctgctgtgtgtccacagcctggcttctgtttcgggggacgctgagaacattccttcctcctggagcatcgcttgtgaacgtgtgcgttgagaaaccacacctccttggaggacccccagttcctgtttcctctgaccgagagccgtttcttagaagagaaactacattccagtcatagcatttttaattactcagttcctggcacattaagaactctggtagagaacatctctagaagatagtgaggaaaagtggatttactcccacactgctactccttgctttatctgtagctggtagaatatccttactcttgtttttacaacttaacggcattttcgttatgatagagcccagagatctgcattttaaaattcacacccctgctgattctgatgcatgttttcagagatcacactttgagaaatagtgatctacagttaattataataacagacattaaagtataaaataagtttatgctaattgatttattaaattcagaaatatttaccgagtacctgttttgtgttacgtcctgataatatcaaaatgaacaagacaccttccgtaacaaaagaggactattagctagttaggaagaaaattgtaaacagataattgtaaaacaatatgggaaggcagtgatagggatatgtacaaaatacaatggtagtacttgaatatctttcctaaactagtctggggatctgggaaggcgtcttggaggagttaatatctaagttgagctttgaagggtaggttaagagttgactaggatgagagaggataagcttgatttttctttttatttttttccttttcctctttgccaccgtgtttcttccagtcaccccatgtcagtagatggtatcaccatgtttagttagtgcattagaaagtgaagccaaaattcagtgtctcaaaacaagaagcagttattattgctcacaagtctacgggtcagctgagtggttcttctagtcctagttgggctcattgatgcatccttgttcagtaatggatctgctgggaagctctgctcatttggctggacttcctcatatgtttggagggtgggggtagggtctcagactataagcttgtttaagattctttcacatggtctcctcttgacttttctccgtgtggtctcttatcctttagccgactagactagcccaggttggtaccaagagacacttgtgccagagtcatttggggtttatttcttttagccactgtctgcttggtagcaagtccggtcagctccacattttgatatctctaggcctccaccctaatccaaatcagagttatctcttacctgaactctagtagcctcctgactagccttcctgccttcacttttgggcttcgtcattgcattctccataagacgtacttatcggccttttaaattctatcttgatttgttgtctgtttcctccactagactatgagttccttgaaaacagtgatgtttttcttttgttcactaccctatatctagtgcttggcacataggatgtattcaataaaatgagtatatgaagaagagaagaaattgttgaggtcattccattcatgggaaagcatgaggaaagggaaataattagtaggttgtatgctggacatccttgcactcttatattgctggagcaaaacgtctgggaaagtgagaggaaataaatcagtgagggccttgtttgccttttggatttcttggatttccggtcattcagtgtttccctgacatttttgtattgagccattacaatataaaataaaactcagctgctgtagttctgccaacttttctgtttactaggtggagatgtttcttaaaaactatcatttactcatctatcttttcataaacaaaaggatattttaacaccaaaaaagcaggaagcaaaatctcacaataaacaatccattgaatactttaactttagaaaaaattcacaaagttgtccttgttccgtactcatttcatcagcgttaatcttagattctgtgtttgggatgtacagctgcaggatatcaggtgccatttgaagatttttttttttttttttttttttgagtctgagtcttgctctattgcggaggctggactgtagtagtgtgatctcgtctcattgcaacctctgccttccgggttcaggcgattctcctgcctcagcctcccgagtagttgggattacaggcgcccgccaccatgcccagctaatttttgtttgtttctttttgtttttgttttgttttttgagacggagtctctgtcgttgaggctggagtgcagtggcgcgatctcagctcactgcaacttccgcctcccgggttcaagcagttctctgccccagcctctggagtagctgggattacaagtgcccgccaccaagcccagctaatttttgtattagagacggagttttactatcttggccaagctggtcttgaactcctgacctcgcgatccacctgcctcggcctcccaaagtgctgggattaacaggcctgagccactgctccgaccgatttttttttttctttgaagttccggggtacatgtgcaggatgtgcaggtttggtacataggtaaacgtgtgccatggtggtttgctgcacccgtcaacccatcacctaggtattaagcccagcatgcattagcaatttttcctaatgctctccctccccctaccccattctctgacagaccacagtgtgtgttgttcccctccctgtgtccatgtgatctcattattcagctcccacttacaagtgagaacatgtggtgttttgtgttctgttccttcgttggtttgttgaggacagtggcttccagctccttccatgtccctttgaaggatatgattgtgttcctttttatggctgcatagtattccatggcgtatgtgtaccacattttaagtacaagggacgtgaacagatacgggagttgaaaagcttacctcagactctgtggaggttgagtttggaagatgagatgactgcacacagcagataggaggcttttgcaatagttcacatgatgagtttttcattaggaattacttgaggatgatgaaaaagattattttgtttaaaaactatcatttctagagatagtgaagcataattgaggcgcttctggtaatttgatttcttttattctaactgaaggagttcactttagttccacaaacctttgatgggcaccttggctacctgaaacactgcatttaagatgtaaagatgatgtggtctctggtgtcaagaacttgatgcaatgaggcttattctcttgtcttaaataatgttattaagttgtaccaaaatttcctttgctacataagcagtaaatgtcactttgtctttttctattccaaagaacgaaacaaaaaacttatttttaatcaaattgtaattgtcttttgatccggcaatttccttcctaggcatttataaatatccttttcctagaatcttcatttagtacaagtctttttatatgtttttatatgtttcccagctatatttcacctagctaattcatacttcattctttcatgttggcttacatgttacttcctcagggattcctttcttgactagtcagaatctacactatagaatctgtattatgcgttgccatagtaaccagtacttcatagactttatcatacttcgtagcatccagtatgttttctttgctaagattattgattttgtattgaagggtcccatgtccatcgttttcaatgctttatctccagggttggagcatg

SEQ ID NO: 199 - DNA, 229 bp, Homo sapiens
gtgagcaccagataaacttttattgtgttcagccaagtgagatttaggtgtttatccatacagcaactagtgtcacctgaagggatacagagatttttctcccttttgctggcagctgcatgcagatgtgacacttcaaggcttaagagcagtgctgaccctgtagggtggaggagactggaggggaggtatccggagaagtatgagcaccaccagcagatggggtggt

SEQ ID NO: 200 - DNA, 31737 bp, Homo sapiens
tgaccaagcagctactaatgttctgcactattaataatccaatcattatacaaaactaatagacacagattgtttcaattctaaattcctaactttgatttaatcttccctcccccaatcctaccattcacagtcttgaactacctttgctgtttttatttttatacataatgtctatagcactgacaccaacatttccagcccatatagcttctggtaagccacctttcaaaaagatagtatatgaaagttaattggacaaaaggagaaacctaaagtcctaagaatgcagcataagaccataaatatatccacctcacattcaggtactgctaatgttcaaacatcaaatactacgttcaaaaagtattagacctcttagtacacggccttaagtttttaaaaataactggctgagaaatgcataactccaaaattatatagcaaaccacaaggaaatttaggtcagtgtttaggccatctacagaggacaaaagttgtctaacaattcagcttaatggaaaaattattttaaaagcaaataatttgatgaaaacttagaactctcaatattatttgggtaaaacagaaaaagttttatctcaattatatttcttttaaatgaaattagtagtgagccttcagacttgtttccaggaaagtctaaacatttaaactgtgttagatgtgcactcacagagagtaatgtactagaatctcctctaggatgtaaaacttttattaatttttacatttatacattgacgtttttaaatactgggagttttattctatcccatagtaacaaattttcaaaatcaacataatgaaattaaatactggagttatatcttaaatttgtttaatgatacaaatgccataaaaataaaatcatcctgattatatacattctggtatatagttattatcggtttaactgcagattccttttttgtttgcagatttgttttaaaggcccccaaatgttcaaattttgctggttctacctttaagttaaacaaatatataatcaaatttcctaaggccacatacaaatttataaataaccggcttaataacaactgtgtgaaaatacacactgcgaacattataatgaaaagcaaatgaaaaagccataaatacaagaagaggattattttcacagcctttgagacttaactttaaagcttttattgactgactccctgcatgattctttacaaaatatttattttaatttttattttgagacagagtatcactctgtcacccaggctggagtgcggtggcacgatctcagctcactgcaacctccgcccacggatccaactgattctcatgcctcagcctcccaagtagctgggattacaggcgtgagccactacacctggctaatttttgtatttttagtagagacaggggtttttgccatgttggccaggttggtctggaactctgaacctcaggtgatctgctcgcctcagtgtcccaaagtgctgggattacagatgtgagccaccgctcccggccttttcaaaatatttaaagagaaaaaaacaaagtactatatctccagggagaagtatgatgaattcactattaaaatttttctactgtaaaatcatttataagctgccaattatcttagatttctgtaaagatctgttaatattctttttttttttttttttttgagatggagttttgctcttgttgcctaggctggagtgcaatggcgaatcttggctcacggcaacctccgccttccaggttcaagcaattctcctgtttcagcctcccaagtaactgggattacaggcatgcgccaccacacccggctaattttgtattttcagtagagacaggtttcaccatgttagccaggctggtcttgaactcccgatctcaggtgatccacccgccttggcctcccaacgtgctgggattacaggtgtgagccaccgtgcctggccaatattcttaaaaatctaaagttttataactaaaatattcctgatttagtaaccagcttagtaacttactctaaaaagacagtacattacattcaccaagaaaaataaccagcctggagaacattcaccaagaaaaacagccagcctggagtttatatttgtgaatataaacatgtcaataactagtatgccagagcacactcagtttattagagtctatttttatcatttatacaaggtagaaagaaaattacagtcagggaaaactaacaaatagagactttaacatgaaagatcattttactgattaagaaaactacatggaagtatacatacagcattgtaaccaaaatgcaattgtaccctaaaagctattaaaataaaaaaaattttaaataaaataaaatggaaaaaaagaaagtatacatacagcattatcaatgtgcaaaataaaagtgctgctttaaggtgtaaagcatacttttttaagacagaaattagggtcttggcataatacaagggtttttaaggagcaacttctccttcctcctgacttataacaatccatgcaaaaaacaacctggggcattctataaaatgttaatcaaaatgtcaaagcatgataattcctatacatattcagagaacttttcaaatcagttgttcaaattttccacataataaaattacaattaatcatccaagccccaaagctattttgcatttaattgtcattttttaagatatgaaagtagggaaagtctgaaagttagaaccaaacaaatgttattctacaagatcaatcttaattattttgtgatacttttccaaaatcaaaggtccttctatagaaaaagagattggacccatgttaatagattaaagtattcatgattttagagttgatttacttatgacaataatttgaaagaaagcatcattttccaatgaaaggtctttgccaatattttatacttcttttaaaaacgcaaagaaatacaggaacattgtcagattgtttaggcaacattattgaagaaagctcacacgtaagctttgtattgtgtagacaagttaaaataccaaccctgtgactgccaacacttcgaatggacaatgcatcctcaactccctgataaaaatgaaaataaacacagtaaaagtttgtgagtgattacattaagctaatgaggaaaagtattagaggcaagtgtataggttattacaaaccagataaggacgatggtgactggaccggtgggaatacctggccctttccgaatcttcctgggaaaggagaaagtacatggagagttaatcactgaatagacagttgtttatcagaacaactgagcaaagagcagtcagttaacagcacagcaacaactcctgagagcaggcaggtttggataacttatcttaggggcagccacattcgtgtgtgtgtgtgtgtgtgtgtgtgtgtgtgtgtgtgtgtgtgtgtaagtttcaatatagcagtactagttttctttctttttttttttaattatactttaagttctatggtacatgtgcacaacgtgcaggtttgtaacatatgtatacatgtgccatgttggtgtgctgcacccattaactcattatttacattaggtatatctcctaatgctatccctcccccctccccccaccccacaacaagccctatgtgtgatgttccccttcctgtgtccaagtgttctcattgttcaattcccacctatgagtgagaacacgcggcgtttggttttttgtccttgcgacagtttgctgagaatgatggtttccagcttcatccatgtccctacaaaggacatgaactcatccttttttatgcctgcatagtattccatggtgtgtatgtgtggggcggtcacattctttggttggaaagaaagtagaaataatcttggcaatgttcctattttatcaggcgtatgtatgtcagaccacttggaatggtctgtataagaccaagagagttcaatataccaagataaaaatgtgcaagtatacttaacaaagagaacttgagttcagcattaaaaaaagacattaatctattttttcattgtgatcatcagtttatgcaggtaggaagaagtgttaacattatcactgatgtattttaagacagtatatgattctaaaaatacttggattataattttgcacttactgtaaagattttttttcaccactctaagaactaactgaaacagagcctgattgtgttgttaatatgaaaaactacttacatctagaagtaattacatatatattttagagttggtcaagttatctcgaataatgccataagcagatttttaaaaaaaaatgattgcagcctaacagttgactaaattaaatgtaattctaaacttttccacatttagctattagcaatggagcattaaggcctgagtcatgtgagataaaatggctagtccctaaaacctaatcatctcaaacagtaaggaatttctgatctttcagaatttcaagtccaaagtgttaaagtaatgtgtgctgactgaaaatctatacattactgaccaactgggttcatagcttatcaatgctgtatttttgcaaaatgaatcaatgcctcaaaactccctggttgacatctgctgtgactgatgcccttgaccaaatgtatgctgaagtctgtttataagcactactatgattcaatttctaatcaggtattctgatctttaggaattcgtcactgatttacatttgttgttgttgttgttgttgttgttgttgttttttgagacggagtctcgctctgtcgcctaggctggaatgcagtggcgcgacctcagttcatggcaacctcagcctcctggattcgagcaattctcgtgctttggccccctactaagtagctgggaccacaggcacccaccaccacacccggctactttttgttttagcagagatggggtttcgccatgttggccaggctggtctcgaattcctgacctcaagggatctgcccgcctcggccttccaaagtgctggtattacaggcatgagccaccatgcctggccactgatttacattttttattatgcaatagacacatgtagtctgcaagaagccaagaaaatttcttccctttctttatcaaccacgaaagttttgggggcatgtgtgttagcctagaagggcaggtacagcttagtaagtggtaatcagttctaggctacttagtttggttagttcaaaaagcctttactataaggtgagttaactcaacatgcctcttccaatattatttgaggtactagggtaaatacggtttaatgtctaatcttccctttattctagccttttttccattccatctatcacacagagcattttcaaaaatctcacctaaagagcatatcccattaaagatgcagcaaagacagatgaagtcatactttcaattatgccccttatattaataaaaacaattataaattaaaataccttattaagtattgatacatagtacctctatatttaaacagcttttcttgctccatttgaaaaattggcctaaaaagacttctgaaaactacagaataaaatataaacccccatacaggtcagttaatttggacaaagagtatagtttattccacagtcacaaactataccttaaataagcactgtccaatacaactttctctgaccatggaaatattctatatttgtgctaatgtagtacccactagccacacgtggctactgagcacttgaaatgcaactgagaaaccaaattttaaattttatttaattttagtcaatttaaatttaaatttaattacctacatggggctaccatacttgacagcacttctctaaacctatttgacaaatgtgtttacgtaaaactgtaaggcaagctcaaggcaaattttaattataccaaaaacgttcaaaacacatattctactaagagcctgctaagtaggaccactctcatatagaaaggcaaaacatttgggtcatttttaattacttctaccttgaatacttttgcacagtggcaaacatgagggaaacagaccctggtagcaacgatataaagtgaccctggtagcaattctatttttaagagctagaagagtccttagagatcatctagtctgaccccttcattttgcagtaagaaagttgcagcacagaaggattaagtaagaatctatgagatcataaagctgagaccagcatttagacgtttttattcaccagacaactgaactgtaaagataacatcctatactggctaaatttccaccaattacataagaaaaaaagaaagaaagaaaatggcaaggtattctggtttttactcagagattcttccttctctggaagaacaaaaagcttcatttgccaggtatttctagagcactatttatattgccaataggtttctcttgaagaaattataccagtggacaaagataacagattacagcaaactgtgttcttaggtgccagttacaaggtgtatccctctattccacagtgaggaaaataatacatcgtcattatcccaaaagtccttattagcactaaagcactaaagactggacaaacagtacaacgccttaaaaaaaaaaagacatgtatttgttcaaaatgctgttttgatacatttaatgaaaatgaaatatactctttgtttttaaacgttcacctgaagggaggatgaatggttctattaaaagaaaaccacagtcccatgaatatacctggccatcttttctgtcaacaaatagtatttgttactaagttgacaccaaagtcattccttcagtttcaaattagaaggaacttcaaaaaccgtatttactcttcaagacatgcatttactctttcagaatcaccactgattaagaaagacacccagtttaaaaatagaatcattgggttcatggaaagttgactaaactaacactaatgggaggcccaggaaggtgtgggtccttttcttcctggtcctttcaccttccagcacattaccaggtgtggcactctctcataccttcaaatactggttctgccaatgactatgcaagttatttacttcaccaattctttataaacatgtctataaaattgagacagtaatactgtcttataatgtgaaataaaaacctatgtaaaaagccctagcacagtgctgatatacagtatgcactcaaagttggactcatttctgagcttccttccttttcattccctattcatgtcccaacatcacactcccacccaaaaaaaggtattataattaggggaaattacaaatataggaaaatttccttccttctagtaactgacaatcctattgtggattgtgtgtgtatgcatcatttattttactataaacattagccatttatattttgtattgtaactattacatgccaacttctccttatgggctcacagataaagcagccagagagacaaagataaatgagcagaagaatcagtttaatttttttctttttttctttttctttttatttattttgtttaccttcaaccaactcacaccaaagaatcagtttttttgttgttgttgttgttgtttgtttgtttgtttgagacacagtctcactctgttgcccaggctagagtgcagtggcacaatcttggcttactgcaacctccacctcccaggttcaagcgattctcctgcctcagcctccctgagtagctgggattacaggcgcccgccagcgtgcctggctaatttttgtatttttggtagagacggggtttcaccatgttggccaggctggtctcaaactcctgacctcaggtaatccacctgcctcggcctcccaaagtgctgggattacaggcatgggccactatgcccagacccaaagaatcagttttaacagggtaaaagcaagtgtcagaacgggttagaagtgataattattcccatctgaaaagaaatgccactttctctgcaggtccaagtcctgcccataaatcaagacttggattagtcactacctgaattttaaaactctagcccaaaggtcacccctttcaatgaaaatctagcgtactcactgcctaaactatacaaatttcacagaggtttaaaaaaaaaaaagatttggctgggcgcggtggctcacacctgtaatcccagcactttgagaggccgaggcgggcggatcacctgaggtcagtagttcgagaccagcctggccaacacgatgaaaccctgtctccactaaaaatacaaaaatcagctgggcatggtggcgggcgcctgtaatcccagctacttgagatgctgaggcaggagaatcgcttgaacccaggagacggaggttgcagtgagctgagattgtgccactgaactccagcctgggcaacaagcgcgaaactccatctcaaaaaaaaaaaagaaagaaagaaagaaagaaagttgcttgtttagcagcaatcagacagtggttcttaaccctttaggaattacagactactttgagaatctgacaataaaaatacctgtgggcatttcccataaaaataattacatttgaaagtctgcagtagaatttaaggcttcatatccctctcccaagcctagtcatataccaagttaagaagccctgtaataggagacagtggggaacttaccaagcctaaaaaaaagttcaaatttaggaatgattcacattatctaacattttactgattcacaatttgtttttatagctaacaaatttgagagtagtggtagagaatttaaaaaggacctgaaggagttgatataataagagtaattttcagaggaaatgaaaagaattacttgggtcatctttcaatgaagaccatgtggacttatttttttaaaaaaaaaggggagagagaaggggggaagaaaagaacaaacccataaaaagaaaacacacattcattttctcactctttcttgatcaggagcattcatgagatgaaggtgaggatactgactacaacataaaatggcaggactccaagtatacctctggtccactatagacagaatagacactctgacctttaggttcacacaggccaaacactcctactttgcaaactattagttaatgttttacttcaagactgcattatttcagcaattgatcacaacatgcaggacaggcaatactggcctaccagccacttctgaatctgtccccacttccgatcaaaggaatgaagagagtactagaaatgcaaaaatttcataaaccaaatagtttctaacatattgcattctccaaaaaccttaaattaatcatacacattttccctaaaaaacaatgatagctgactcaaagttacacattcaaaatacagaaaattagtaagctaaatatgttcaatagtaagagatgcatgtttccctgtagttcagagaactgtaaatagaacttacatttaataactgtctcattcacttatttatttatttatttatttttttgagacaggatctcacttagttgcccaggctggaatgcagtggtgccatcatagctcactacaacttcaaactcccaggctcaagtgatcctccacttcagcttatccacttattattatatttagtataattttaggagtaaaaagacaacggattgcaacacttcctcttcaagaactgcattccatatttgaaactatacatgaggttaaaagaaaattagcaacatgtcaattgttagtgtttttcttgagctgtgacaatataaaatatttacattgctttttaacctgctcacagaaaattcaccaccaaaatcaaaagaaagtgtttaatactgtcccataggcttttgccccttcatactactacaacatcaaaaatatttattatgggaattttcaggaccaagtcaatgtcagaaaagtaaaagcatatttatttcattttaatcagcccaatttccatatgcctattcttaaaaatttttttcttgttttcctttctgataaaagtatactgaaagtttgtaaattatagaaaagtatagaaagaaagaaaaaccaacaataattccaccatagacaaactgcagtattaataatcacttccttctagtagttttttgatgctatatatggatactggtttttgtaatataaaattggggtcctacaaattttattgttttggtttgcttttatctcatattcttacatattttcctctattattaaatatgttttaaaattgtaagtctgaatgactttacagtgttttactatatagatatcataatataattaatccaaattttaggacaattaaagctatactacactttgtcattgctaaagctaccttagctaatgtaagtgaagcactcataatactagtaacttataacaatggacacgataatagctataaatgtgtttgttgttactacttaaaacaaatatcacatttaatttgctggcacagaatggcttgataaaatacatacatcagtttatactattttcaatgtttcaaaggaaaccagattcacatcagaataaactagccaagtactgattttgggggagacaaatatgaaattagggttattccctcaaattacctctttttgttgtcgttccagttctctcatgcgtatatctcttgcttctgcccgggcagcccgttttgctgccagccttgcctctgcctgaaaagtaatataaaactcagctttatacaacaaaaacaaaaacaacctgtacaccagatttgaaaataaagaatgggacattaccacgcaaaaggggtgggcaggagaagatattatctatcagcaagcaagtttgattgattgttttaatcaactcttataaactcatttctttctctagttcctaagtctttcctcaaatccgggcctttacctttaacttcttgtttgattacacactcaacacatttcatacagtttgttatatgcctctccaaacttactctttttccagaattttttccccattgattcaatcatataaactagaaacttcagagccaacctctctttcattttggacactgccaataatcagtctccaagtactgacaattctctaccactgagtctctatcaaacccatctcagctttctttattctcactgttcctgctcatttcaggaactcttcatctccccactccccacctctgttttaaaattgagacagaattcacatatcatcaaattcactatttaaatgtatacaattccgactggatgcagtggctcaggcctgtaatcccagcactttgggaggccaaggcaggaggatcatatgaggccaagagtttgagaccagcttaggcaacatgatgaaaccctgtctctactaaaaataaaaaaaatagccaggtgtggtggtgcacacttgtaatcccagctacttgggtggctgagacaggaaaattactcgaacctggaaggtggaggctgcagtgagctgagatcatgccactgcactgcagcctagatgacagagtgagacgctgtctcaaaaataaataaataaatgtatacaattctgtggtttttagtatactcacaggatgtgcaatcatcatgactaattccagaacattctcacaccccaaaatgaaacctggtacccattagtagtcattccccattaaccctttctcccagctcctggcaaccactaatctactttctgtgtccatgcattcgcctattctggacatttcatatacatggaatcataccataggaattcttcatctcttgcttacagttacctccaaatccatctgcctacttccagaatctgccttataatttatcttctacatggttatatgatggacaaatcagcctttcaaaatgtattatttctgatcacatcattccactgcataaaatcctccaccaactccttattacttatggttaaagcaaaaattccacagaacagcacaaagggaggaacagaaagaagaaaggtaaaactgaaataaggctcctcacagtcaggtccccaccttacttccaagtccagtagttccccccttatctgttgtttcagttacccatggttaaccaaggtacaaaaatattaagtggaaaattccagaaataaacaattcataagttttaaattgtacgccattctgagtagtatgataaaatctctcaggacgtcaatcatccctttgtcgagtatatccatcctgtctatgctacccatttgttagctgtctcagttatcaaatcacagtgattgtgttggagtaatcctcattttatttaataatggccccaaagagcaagagtaattctgacaattcaggtatgccaaagagaagccacacagtgcttcctttaagtgaaaaggtgaacgttctaccttaatagaaaaaagaatcatgcactgaggttgctaagatctatggtaagaacaaatcttctatccatgaaattgtgaagaaggaaaaagaaatttgtgctagttttgctgccgcacctcaaacggcaaaagttacagccacagtgcatgatagttaagatggaaaaggcattacatttgtaggtggaaaacatgaatagaaatgtgttctgattgatggcaatcaggtttgctactatccacagtttcaggcatctgctggggggcttggaatgtatctcccatggattggaggggtggggactactctacttgctccacgtgtactgggtgcatcccatctctctccattcctggactctattgtgttctgttacgcctctcttcacaaactgtttggcaggagctgttctcctttctcttattcagtaaaatattaccttctatgaagattctccccagtccctctttcataaagtaaggctctatacccatgtctctattgcggctttattatgttgtattaaaattccatgcttctctcaccccacaacttttatgcctcaaggtctgctaaaaaaaaacaaatgaattgcagggcataggtcacagtatcaaggaaatgagataaggaaatagcttaatgtgccacatgaaacttagaaatcttctgtctgctttctatatggtagtggaatggtttcctctgtccttggtcacatcctaactctgattcagactatcccctctgataactatagttgttgtcttcccatgttgttatattcgtgcccaagtctcatagtaagaataaactcaaccaatgtttaaaaggatctactacattaagcaattatgctaggtgctgaaaatacagagtaaagtatgacatctctgccctaaagcagctcacaaagttgaagaatacagagacacaatgcttatgggaaggaagcatgtaggagggagaaattagttttgcctggcaaagtcacagcaggcttctaagaagcagagagagttaaatagttaactgctactcaactattccaattgtggcaatttcccagtctgtgtaactggtcttttaatagaaaaacccctgcaaagtaaattgtaatctaccaaccgtaagctgtaaccactaacaatctagagaaattagttttctcccatgaattttacactggcctccgtcttttcaaaacctatgctctgcttcaagttatctgccttcttcacccctctatgagtagacactagtttcttattagagttttttttttttaataggaaacacttcaaggcttttaagcttaagtagatagcaaatgtattttaaaatcacaaagcatcaaaactttcaaacctttttaagaaagccctatcaatgtgtaggaattttcatttacatgtatattaaattgtacctgaagcctcctttagaaatttaattcaagaatgctaattttatccttctaagatttgtctgtggccaattctgtacaatctatatatactaaaatgagacttccttcataaaacccaacttagagataattaaaatctattctttaataagacatttttaactacaaaaaggaaaggaacagaaagaacatgggcttcagagacacacaaacacccttccctttgttacttagccaactcagatgttacctcccttggagactgtgttgaagagaggccattaaaaccacatgctttaaaagaaataaacaggatttaaaactactttatctggttctttctatacattattactagatgcttgaagcaacatggataagcaggagtagcaaggagccaacactgattccaacctagtagacgaaatatatgctctataacttattgtgatatattttaaaattatttttgaatagacaattatgggtacataaaacatacttctaggtagttaacactagcatttttacctcagaatacaatcagataaagagctgctacagattcattttaatatacacctcatacatacaaaataaatgggatataacaataaaggacaaccaagatttaactaaattcacagtaaaggctgggcgtggtggctcacgcctgtaatctcagcactttaggaggacaaggcgggcagatcacttgagaccaggagttcaagaccagcctggtcaacatggcgaaatcccgtctctactaaaaatggaaaaaattagctgggcgtggtggtgcatgcctgtaatcccagctactccagaggctgaggcatgagaatcacttgaaccctggaggcagaggttacagtgagccaagattgcaccactgcactccagcctgggcaacagagtgaaactctgtctcagaaaacaaacaaacaaaacaaaataaagttggctaaaacacacaattaccatttgatccaataattccacctatgggtacatatacaaaagaactggaaagcagagacaacatatatttatataccaatgttcatagcagcattattcacaacagtcaaaatgcagaaacaacccaaatatctatcaatggacgaatggatagacaaattatggtatacacatactttggatcattcagccttaaaaagaaaattttgatacatgctgcaacatggatgaatcttgaagacattatactaaatgaaataagccagacagaaaggagtaatattgtatacttccacttaatgagaaacctaaaatagtcaaattcatacagacagaaagcacaatagtggttgccagggactgagggtagggggaaatgggactcactatttaatgagtacagagttccagtactggatgatgacagagttcttaaggatagtggtgatggctgcatgacaatgcaaatggatgtaatgccactaaactatatacttaaatatagttaccatgataaatttcatgttacatatattttaccaaaagaagttggctaatttaaaagtcagaataagatataaattagaagtattcagaagcctaaattatttaaatacttttagagtctttcggctgatatgaccccaactgttataataaagttaatataaaaattcagaaaaattcagaaaaattcaggagttcaacaccagcctggccaatatggtgaaaccccatctctactaaaaatacaaaaattagccaggcatggtagcgcttgcctgtagtcccagctacttgggaggctgaggcagaagaatcgcttgaacctgggagacgaaggttgcagtgagccgagatggcaccactgcactctagcctgggcagcagagcaagactctgtctcaaaaaaaaaaaaaaaaagacagtgaaaatcatgggctttgatcactcccagaacaaatgcattaggttgtatttaaactcacagaacttttaaatttgtagaatattcactgtatcactcaatgaataattaggaatcacataatggacactaagaaagaacttctcggcctggcggtggcctgctccagttcgagccggtacctcactgcatctcgcaagaatttgtggatttgggggtggaaccccattcggaagagcacaaaaaactgctcttaagtcattgcaaagctacagctctggttagccagccacaaagttgtcatgagagtcgtctccacaataccaagagcttgtgtctggcagagccggtatgagatgagacaatgctgtcccacctccgggataaccaggagttttggccagacttttgagcacataccgagagagtgaggagccagatgacaagcacatactatggcactaagacagattaataaggaacttagtgatttggcccatgaccctccagcacaatgttctgcaggtccagttgaggatggtatgtttcattggcaagccacaattatgggacctaatgacagcccatatcaaagcggtgtattctttttggcaattcattttcctacagactgctccttcaaaccacctaaggttgcatgtacaacaaggatttgtcatccaaatattaacagtaatggcagcatttgtctcgatattctaagatcacagtggttgcctgctttaaaactatttctaaagttcttttatccatttgttcactgctatgtgatccaaacccagatgaccccctagtgccagagagcacacggatccataaaatagacagacgtaaaagtacaacagaatatctcgggaatggactcagaagaatgccatatgatgctaccttaaagtcagaataacctgcattatagctggaataaactttaaattactgtttaaaaaaaaaaaaaggctgggcacgttggctcacacctgtaatcctagcactttgggagtccaaggcgggctgatcactaggtcaggagttcaagaccagcctggccaatatggtgaaatcctgtctctactaaaaatacacaaattagctgggcatggtggcgtgaacctgtaatcccagctactcgcgagcctgaggcaggggaatcgcttcacccaggaggcggaggctgcagtgagccgagattatgccactgcactccagcctgggcaacagagcaagactcagtctcaaaaaaaaaaaaaaagaacttccaggaaaagagaactaaacatgtactatggtttatgtatttctacattagatacttcctttaccatcataattttgtattatgttcttttggaatttgagaaaagtagatgagatacaataaaaatataaataattttaaaatgagcaaaggatttaaatagacatttctccaaagaagatataaaaatgaccaataagtacataaaaagatgctcaacatcattagtcattaaagaaatgtaaattaaaaccatattgagatacttgatatccactaggattgctatgataaaaaatgtttttcaactgaaaataactaaaattggcaaggatgtggagaaattagaaccctcatatattacaggggtaaatgtaaaatggcacaattgctgtgtgaactgctgaggcagttcctcaaaagttaaacacagtgataccatccatccacctctaaatatgtacctaagagaaacgagaacatatatccacacaaaaacctgtaaatgaatgttcatagcagcattattgacaatagccaaaaagtagaaataacccaaatatccatcaactgatgaacgaataaaccagcgagattatccatacaatggaatattattcagccttaaaaagaaatcgaacactgatacaggatgcaacatgaatgaaccttgaaaacattttgctaagtcaaagaagccagacacaaaaggtcacatattgcatgattcaatttatatgaaatgtccagaataggcaaaaacataaagacagaaagtagattactggttgccaggggctggggaaggggaagatgaggagtgactgctaagtggtatgaggtttctttttgggctgatgaaatgttatgcaattaggtaggtgacagttgcacatctttgtgaatatattaaaaactactgaatatttttaaatggtgaatagttttgatggtatgtgaattatatctcaatttaaattttttaaatagatgagactgaatgcatcaaaaatgcctaagctaaataaatactaaaatatataaaattctaatacataaaacttaatatataaaatgggataaaggggagcttataacctattaataacaagtttggaaaatgctaagttaaacattttttaaaatcagagtccttaataatatgcattatgaatctcaaagaagaggatagaatatatagtatttctcagacttgaccacattactaaataaaccctaaatgatacttcaagggtcatgctccaagaaacacagtttgggaaataatgattaagtaatatatcaggatccaattacaactgtactaaatcttacctttgctcttgatacttataaaattaaactaaattatctgaataatcacctcacaatagaaaacccaaactattcagataatatatctaccatggtttgaccacttacttagcaaggatagatccttattttctttcttttttggggggggtgggggggtggggggggggcggggacaggctctcactctggcacccaagctagagtgcagtggcatgatctcagctcactgcagccttgacctcccaggctcaagtgatctttcccatctcagcctcctgattagctgagactataggcatacaccaccacatccaaacaatttttgtttttgtttttgtttttgtagagacaaggtttcaccatgttgcccaggctggtctcgaactcctggactcaagcaatctgcatgcctcggcctcccaaagtgatgggactacaggtgtgagccaccacacctggccttattttcttttcttccacaaaataacccattgaagtacagaagggttaagtaacttgccttccccagacaagcaaatactggagctgagatctacatcctaagaatcttacttcagttcacactcttaaccacattgccaccaacttacatctttatagtccaagtataattgcatatccttagacaaatcataaaaacttactttggataattatcctaggattttcaacttagcacagattctctcttttctatgaaataatactattctagttctctgaatagagaactagataggtaaataatcttctccttttaccatacacagtatctaataaccaaatgtagataatctccttttactgtacacagcctttactctcattttttattcccagtttcaactaccagccaatgagaatgactcaaatctagcatctcaagctctgacttctctaccaaaataaacacttacatttctaacatctatcttgtcagcaccaaaaccagagtgaataaaatcagtctcattttcccccagtcaacaggctttgcttccttattttccagtttccattaatggaatcttgtcactcttgttcaaacccaaggtctgacgacctcctacttccttaacaaatcttcctttacaatatcccttgaatccatcctctccatctactccaacagactccctctacttccaaataggctctttgtactttcacttataatacatcaagttttctaatcctaacttcagtttctccatctcaactctatccccatccgtactattccatcgtggaattaatttacctgaagcaatttacctgaaacaaggaacaagtgaggtaaaaatgtctcaaagtaaaacgtgattagctatattctgtgatgcccaatacccaaagcattcttaaactttctgatatttaaatttggattttgttactgcttcagttaaataaacagaggggaacaggctaaaataaacttgttgtggctcatggtggcattccaaatcagagactcatgtgaggccaatcaatcgtattctaaattttccatccatccaatgggtctacaagtaggaggaacctattcaatgggctaggcagtgctgtttccctaaaataaaatccataaattgaatttcacttgagactgctatctgagaggaggaaaagggtatgtatatttaagtactgtatctaatgaaccacaaataagtgtatttcttcaggatgtaggtactttaagtatatagtagttcccccttatccaagtaagttccaagtccccccggagatgcctgaaactgcagatagtaccaaaccctatcccactgtcatcaatcagaacatgtttctgttcatgtcttccactcagaaatctagtcttttccatcataatatacttatcacacacactggctataacttctgtggtttgagatgcagtaggaaaactaacacagatttttcttttctttcttcacaatttcatgaatagaagatgtgttcataccacagatcttagcaacctcagcacacaatttttttccttactaagttgagaactttcaccttttcacttaaagaaagaattttatggcttctctttggcatatccaaactgccagagtcactcttgctctttggggtcattattaaataaactaaaggttactcaaacacaaacaatgtgataccatgacagtcaacctgataacagagccggctcctgtgagactatctagcaggtagcatacactgtgtggatacactagacaaagggatgatttatgtcctgtgcaggatgatgtgagatttaatcatgctactcagaacactgcacgatttaaacaaaaataaacaaactgtttatttctgaaattttccatttaatattttcaaactgtggtcaaacataagtaactgaaacctcagaaagcaaaatcacatgaaggagaggctctgcacaatgaaccatacaaggtttttaaaaacaaaatgggtaccaatcaatgtgtagcctatttaaaaaacaacaacaaaacaggaaggtatttccaagatatataatgtaaatgatctgaattatcaatggaaaaagtttctctgcaagaccttatcagttcagcacttctttcattattccagttctgacacttttagtatttcccctcctgtgccaatgttttcatgacagaaggcattttaaggtctgaagaaggcattcgcttcacaccctccaaagccactaacagacttcccagtcttcccttctttcttactttccctgtggttctactgaagagctgcctcttctgttgttgaaagtcaaaccctcccaagccccgtcacacacactcacacacatacacaccctccattttatgatgtcctccccaggactttgtcccaactatctgatctctcttctgggtctttgctctctacttctattggttcactctcttcatcataactaggttcaaagtctctctgatctttaaaaggcaagcaaaaaatctcaccctggtccaattctaccctatcttctctttacagctaagctttctcacacctccctcttcacttctcactctcttcaaatgactgcaatctggcttctgctcatatcaccttattgaaattgttcatcacaaaagtcactaatgacctctaactaccaaacccaatagaatttttctattcttatctcatctgtcttttctggactttcaatatcactaaacacatattctttcttaaaactctcatctcttagctttctccaatactagtgtctcctggttttcctctttattctctcatctctctccttcagcatccttcataagcacatttttccctgctagcatcttaaatgttaatataaccaaagttttcaagcttcacctcttgctcttttcattctatattctctcctgggccatactgttagtctgtaaatctctatgcccaagctagaattttctcccacaatcctgatccaacttgctattaaaaattgaagctgtgctcgctatggcagcacatatactaaaattggaaagatacagagattagcatggcctctgtgcaaggatgatatacaaatttgtgaagcatctttatttatttattcattcatgtatttatttattgaggccggacacagtggctcatgcctgtagtcctagcactttgagaggcaggcagatgacttgagctcaggagttcaaggccagcctgggcaacatgggaaaaccccgtctctactaaaaacaaaaattagccgggcgtggtagcgcaagatcatgccacagtgctctaatctgggagacagaatgagattctgtctccaaaaaaaaaaaaaaactgaggctctcccactagaactcagacttaatacaaccttaatttaatttataatcattcccttaatcttcctcttcttttttatattccccatcaactaccccattacccaaaatatgaaacaaagactcatcataagggtccttcctcttttctatcctccctccatattcagttgctaagtctcaactactttgctcccatcaagattctctttactatttcttctatccagaccttcctctttattcctattgtcattgtcttattttaggttctcatcatctttcactaagataactacaacagcttcgtgaccagcctaggcaacaaagcaaacccccatctctacaaaaaatacaaaaattagctgggtgtcgtggtacatgcctgtagtcccaaaacccaagaagcagaggttgcagtgagctaagattgcaccactgcactatagcctgggcaacagagcaagaccctgtttcaaaaaataaatggaaaactataacagcttcctgttttctgccttctaccttctaccactcactctccactgggtggctaaagcaattatactgtaattcaaatctgaaaaaggatttaccctttaatggctccccacagctttgaaaatcaaatgtaaattcctcagcacacaaatcctttcatgattggtccctatttcctccctaacatcacctcctcccattccctagcccctctccagctatactgaactacttactattctggcagtttcccaccatagtgctagctgttttacaccccggtgtctatagagctcttagaaggcaatatacaaaaacccattaaacaaggctgtttatggtgatacatattaaaccttttttttgaaaccaaacatttatttcgcatttgatttcattggttcaaatgtttaaaagctggagtaaatccacctgtctttcttctgggctcttcctccaatgtgtgttaatctggccaagtatggcatatgctgttgctgaatcctggtcctctaaggcctaagaggctcatccccaggcagggcccggagtcaaagcaaatgcagaaggcggccacaggtacagtctcagtagcatcagacattgtttgggctgattcctgagtatctatcctgtccctcaggacagccagggtttggcactctaagtagctactggctcacgatcataagatcactgcaagaacaccaaccccagcaggtcccagctccagccagtttcctctgggcagcatgtgagaatgggcttcctgcctttttgtttgtttgtttttatttttatcatccagatctagtttcaaagagctccaaaatgtccttgccacatgtggacctgagagcaagagatgacttttcagagccatattcttgttgcatttggacaaaatgaataatgcctttcatagtttctttgtatttctcttcaataggtggttgacccaacatttttcctacttttttttttttttttttttgagacagggtctcactctgttgcccagggcatgatcccagctcatcacagcctcaacctccctgggctcaggcaatcctcccacctcagcctcctgagtagctggaactacaagcacgtgtcaccatgcctggctaatttttgtattttttgtagagacagggtttcaccatgttgccccagccagctggtctcaactccggggctcacacaatccgcccacctcggcctctggtcccaaagtgctagaattacaagcgtgagctaccatgctcggccaacccaacgtctttgccctatacaatgaaaatacaaaatacaaaatgagaacacaaaaaataaagcattacattgtaaaaatttaatttaattggtccaaaatatacttaaataaaatatgcatttcaataaaaatgtctacagtgaaagactttatgcattctgggaaacttcataacatgtagatagggccaacattcacagaggataagggcatttgtatccaatcacaatttgtagcaggtttcttattccaatctgcaagttacactgaacacatcatgagcatcacttcgggagaaaaccaattttgttggggaaaagaataagaaagctccagcctcaattttgagttcattacaacttctcaagagtatcaccaacagcctaaacagtacgagttcaaaaaagtaaacatgttaaggtgatatagtttagatgtctcttccaaatatcatgttgagatgtaatccccagtgttggaggtgaggcctggtgggaggtatttgggtcatcggggtggatccctcacgacgtggtgctttcaacacaacagtaagttctcgtgagatctggctgtcccccttgcgctctcgtttccactctcgccatatgatgtgcctgctcctgcttcaccttccaccatgagtaaaagctccctgaggcctccccagaagccaagtagatgccagtgccatgcttctacagcctgccaaaccataagccaattaaacctcttttctttataaatcacccagtcttgggcatttatagcaatgcaagaacagcctaaaacataagacaagcagataactctttagaaacctaaatacgttttcttgctgtctttatgttgaattctccatctacaacgggcagtcatgaagatggtcttcgtcaggacaacatggtcacaggactgggacaatccaggggaatgagagggagagtcaggggacaggggagagaaggcaatgcctcttgctgctttttcacattagagacaaactgtaacacacagtccatgggcctgcaatcttctccttttatcatctggcattaacacttgatgtagtcatcgactttattcaagaagtcctccttgtcctacaaatgatgttctgcagcttcaacattcagtggatcgtcaaaattcagaagattagtaaacaaataatttaatctccaaataacatcctttaatgatctcgtgggagcccagccagtgctgtcaatcgaatgtcctcagtaaactttagacatatttcccctatctctgatgttagggtaccagatcctggtcaggcatttcactttggaaggcaccacattgtatgcatcaggaagtccagtttcgagctgaaattttccaccctagtagtaaccctcgtctggggttacagtcagcagaaagcaatgaagctttttagatcaggaaatactcttgacatgtacaaggtaaataagctcaagctctgcaacctctttaacaatcaacttgtctctcacagaaccctctgactggggccggatgctatggctgacgtcccagacccttcgagactgtcatcgcacttcagtttgcttacaggtgtcagcgctactcctgcctttaccctgggcaccccaagacaggtgaggcaggcctggcgcccaacaccatgcctggcctgggcagtggtggtgagacacggcccctcatagctacatcgactccaggtggcaggttcagaagttattagaacttttaatacatgaacaagaaggacacatttttattttatcacactgattccttaataggaggaaggagagggataggcctggggaatgaaacaaaggaccttaaacttggtttatatctctttctcccttcctttcttcctaacattttaaagaaaagatctgaaacaactgtgacaacatgttaacatttgttaatgctgggtgttggactcatggatacttatattattgccaaaatctttctgtatttaatgtttttcaaaaacaagccaggcatggtagtggtgcctgtaatcccagctactcgggaggcaaggtgggagaatcacttgagccttggagttcgagtccagcttgggcaacctagcaagacctcatctcaaaaacaaaacaaaacaaaatactacagtagtacacgaaaacacactcaaatgactttaaaagaagaaaatcctctagctttaaaactttagtatcacagtgttgatggtgctaaaactgctattttaaaggaggcaaatttacaattcataatttgacagaaatgcactgaactgagccaatgaggtctggaattgccagccacacatatgttccataacataaaacctatgcaactggcatggacaaaagagagataatgtacaatttgggcctttacagactatgctttaatttcaagaaatttgaaatacaaaatttgagaaagtaaaacattcaaagaaaatgactaactcaggtagcaaagactcagagttcactgtgtttaattttgtttactcttccatgacactcatgccaaaaaaacactgaaagacaaattaagagacataatatttactgtgttgccatggtttccaaattaacaaaaattactgctctatttcctagcaacttccctttagtacaaaaatttttaattaaatcttacaatatgattatgtttaaccactttaagtttttggtagttgaggacaaatatttaaatttttctgagcataaacaccaacatgtagtagataaactctaggaattttaactcatctttttctgatgtcaaacaactatatcttccatttactcggagaccttttgacagcaaaaatattcttttggaatgagagaggactttatacaacccaataaacagtatacaaaaagtaaaactttggatctgcaatgatacatttaaccaaaaatactaatttggggactaatataaatacttgtgagagggggaaaaaaaggtgttgctagtactgtcttcaaatttaggttaatgatattgtgccatctgaatttttttctccaaatccctgtaagtctccaaagcccacctctcctggaacatgaacaatgacttcaaatgggtgaatgttagccttgcttctgatacattttagagagctatctgaacatcatctgtttcctcagctgtaaacatggctagtaataatatctatcctacttagctcaagacttttgtgagaatcaagatgtgaaactgctttcaaagtcatgaaaagttactgaaaaacaaaaaataagctattaatggtggaattagagaagactgattgagaaacaatctggcatagtaagaggttaaatgcacagactctggagccaagcttcagagtctgaatcctggctctactatttcctagctacgtaaccttggggaagttacttaacttttctgtgcaatggtttccgcatctgcaaaatgcagataaaaaaactgactgcagattttataaggattaaatgaattaatgcatgtaaaatgcttagaatagtgtttgctacacagcactcagcaagtgctggatgttagaatcctatacaattttttaaagaaagcatcacattaaaaaaaaaagttcaaatacttagtgacaacacaaaaggagactagaaggtggtggcattttcctcccttacagaaatctgggtaaatccctccaattttgaaaggaaacattctgggtagtttcaaatttcaactacaattatgttgtttccaaaatgcttcatttgtgcaaatagttaagatcactcactgtagagtcgtatctacgttttcatttttaaatcttttaactgaaaaatatctcactgatttttaagttctgggatacatgtgcaggacctgcaggtttgttacataggtaaacacgtgtcatgatggtttgctgtacctatcaacctatcacctaggtatttagccccacatgcattagctatttatcctgatgctctccctcaccccactgtgctccctctccacaggccccagtgtgtgttgttcctcttcctgtgtccatgtgttctcattgttcagctcccacttataagtgagaacatgcagtgtttggttttctgttcctgtgttagtctgttgaggataatggcttccagctccatccatgtccctgcaaaggatatgatatagttcctttttatggctgcacaatattccgtggtgtatatgtaccacattttctttatccagtctatcactgatgggcatttgagttgatgtaactcaaatgtaacccaaaactataaaaaccctagaagaaaatctaggcaatgtcattaaggacataagcacaggcaaaaaatttcatgttcaaaagcaatcgcaacaaaagtaagaattgacaaatgggatctaattaaactaaagagcttctgtaaggcaaaagaaactatcatcagagtgaacagacaagctacaaaatgggagaaaatttttgcaatctatccatttgacaaaggtctaatatccagaatctacaaggaacttaaagaaatttacaagaaaaaaaaaactccattaaaaagtgggcaaaggacatgaacagacacttctcaaaagaagcaatgtatgcagccaacaaacatgaaaaaaagctcaacatcactgattagagaaatgcaaatcaaaaccacaatgagaaaccatctcacgccagtcagaatggtgattattaaaaagtcaagaaacaacagatgctgacgaggctgtggagaaacaggagcacttctacactgttggtgagaatgttagttagttcaaccattgtagaagacagtgtggtgattcctcaaagacctagaaccagaaataccatttgacccagcaatcccattacttgaaggaatataaatcattctattataaaaatacctgcacatgtacgttcactggagcactattcacaacagcaaagacatggaatcaacccaaacgctctcattgatttttaatgtatttttgttatagtaatatcacaatttcttatcaggttttaggtaataactttcctttgctacaaatagcctcctacagcatttgacttctaattcaaaagctaactgagcagcttccaaaaggaaaatcataacaatgagctggatcaaaaaagtgtgtaatgtgtcaaaaggaaatacactattcctaaataagttatttactaataacaaagaggaagtgatatggtaataattctcaccaaaagaatataatttaatgatgctctaagcaattcttataccatattagtttgtggtcagtctgcagttgcagatagagtctgaaacaaagttggcaattaagtaagaaatcccagctggcagtcatcttaaatttccaatatacggcaggaaatgttgccagcgattcaataggtgacgccccttccctttttcttttttctgagttacaacaaactgaaacaaaattgccccagaagttctgttaccagctaacagaattaaacataaaaattccactgcaatgtttcaaaaaataaaacactgaatctgaaccgacatgaaatattgtttccatcaacatttacataccacgtctgaagcatattaactgcatagcccaatgagtatttctataatatagtcatcatatcttcaacattctaattatcctaagtttacattcgaaagattaattataaacttcaatacattataacaagtacatggaactcaagtaacccataaaaatataaagaaaaattaattttggatgcattggatattgtgaaaattgattatataaattggaattatcttgtcatacccaattaaattacagtcatgagatgagggaggaagaaaaggaaaagaaaagcacttagggcacaagcacctgcccagggattatctggcaagccagctgctgaaatgacctgctataaccttaagatcagttttacctagtagctgcggaaacgaactgctataactctaagactagttttacctaccacagtcactcacaaatcagagcatgccagctcccaaaaacttcgctagtgccaatgcattttctttcaaaacaatgcataacatttctctaataaaaacctcaatcttttctttgttctttggacataccaaagaccaatgcagtctgtgtgtatgcccaaattacaattctactgtctcaaataaaatgtgttgttcagagattcatctctatatttgatttctgttgataatatccaactatattttattctaacacactattttagagactagctataacatcttgctcataataaacatctgaaactagttcaatgagtaaacgtctatatctctgtcaaatcggcatttttacaatacatctgtgcaactcagtgttgagaggggatttaccaaacatacctctctggcaatgttactcaaagcttcatcttctgcagaaaatcggtctttcacaggtgttcttttccttccagaagcaggagtccccatcttgtgttcttaatagtcttttaactttgaaagtgatttaactgtgttttcagccctgaagtaaacaaaaacataataacttaaggtatttctttgtgcaattttcatgctcatttatatattcacttttaacagagaaattagtcaccaaatacctcttcccactaccaaattattccaataaattttagaatatttaattttatactaattactaaaactcctacttcttttcactatgctacccacagcaatctgtgtgtattataatattagcctcagaaagctgccatcagcagaaattctacttaaccatttaaaattactatagctgggcagcctggccaacatggtgaaaccctgtctctatcaaaaatacaaaaattagccgagcagggtggtgcatgtctgtaatcccagctactctagaggctgaggcaggaaaatcacttgaacctaggaggcggaggttgtagtgagccaagattgcgccacagcactccagcttgggagacggagcaagactctgtctcaaaataaataaataaataaataaataactatagttatttctaaaaccaatttccatcccagaatgaaaaacatttcagaagttattcagcctaaacttttagaagaaaatgttcaagaggttttactactaagccttatagttacaaaagtaactttgctttttagtgtaatttaagaaaaattccaattaaaccatgacaacgtcaggcacggtggctctcacctgtaatcccagcacttggggaggctgaggtgggcagatcacttgaagccaggagttcgagaccagcctggccaacatggtaaaaccccatctccactaaaaattcaaaaattagccaggcatggtggcgcatgcctataatcccagctactatggtggctgaggcacaagagtcacctaaacccaggagatggaggttgcagtcagccaagatcacgccactggactccagcctgggtgacagagagagactccacctcaaaaaaaaacaaaaacaaacagacaaaaaaaacccacaaccatataaaagaaaaaatgaaggtttattactctgcaattaacaataaccaacactgtccatgttgttaccaggtactataggaggtgctaaaggtacggtgatgaagaaaactgatatagtcaaatga

SEQ ID NO: 201 - DNA, 31737 bp, Homo sapiens
gaattcatcacttatggatttgtcttaaaaaataataattggggaacaaggagacatacacaagaatagtaagttataagtacatacgtataaatatatacttaggtagcaacattatgttaatagttgatatttctatttatttagtcagatactacaccaaaggccatacatgcattttctcatttaattcaaccattttttttaaaggcaccaaaacatcatacaaacaatattctcatccttctccttcaaacacaattttgaagttgatgagtatcttttacagccattttataactttgctgcatatccatgaaccatatgtagtggacaaaataataatgttttctgtgtttttaagatttatacagatgctattatactatatattttcttctccaacctgatctttggcatcaacagtgtattttagagatttatccatgtagttctagtttattcattaaaactatgatataatattccactagataaaaaacactcctatttatcaattcattcttctgttaatgaaaaattagcttatttccaaatttatactcttccaggcagttattcaattactattcttctgtatgtttgttcccggattattatttttaagataaatccctaagtcatgaactactgggcacattttaaagacttttgttatctaccaacaaattttactccaagcccaccaccttcatttatggtcctattagcagttaatgagaatgtctatttctccacatccttgctaatgttatatattgtaattcattttaatttttgctgatctaatagataaaaacaaattaaaaacaaaaagctagcatctcattgtttttttttttgttgttgttgtttttgagacagagtcttgctctgtcgcccaggctggagtgcagtggcatgatctcagctcattgctagctccacctcccgggttcacgccattctcctgcctcagcctcctgagtagctgggactacaggcgcccaccacagtgcctggcttattttttgtatttttaatagagacggggtttcaccgtgttagccaggatggtcttgatctcctgacttcgtgatccacccacctcggcctcccaaagtgctgggattacaggcgtgagccactgcgcccggccacatctcattgttttaatgttaatgtctttgataaggatgggactgaatgtctatcgatgtacttattggccatttgtcgtttttgttttgtgcattgcttattcacatctgtcctgttatctttacaaatatgttgtccaatttgccattaattttttggcttggtggtgatttttatcctacaaaacttttaactttaaaaaaatggtcaaatatatcaatattttcaactggaacttttaatttttttagtcactgagctctgttcaattattataaactctgcagttagacctgctatgtgaaagacaccaagggtcacaaataataggcagttatggcctcaaaaggaatttataatttagttgtgggacaagatattcaaataaaactatagtcaataacacaagctgtctatgatgagtgtcaacacttggcacaaaaaataggtgatttcactttggctatcaggaaacagagcaagcagcacaagtgaatgctgaatcacggtgaccagattcgcttaggcgactcctggaaatgcggaatattaggcatggaatagtcctgagacccacctaatccaatccctccatttaatataaaaacacgcattttcagaggtgactgcccccacacccagcagcggcaccagcccccgccaggtgctctcctaagtgccctcaaggtgggtgcctgagtccatctcctccccaggctctttctgctgcagccctagcactgggagaggctgccatgtgagctgccatggagatcccagcgacacctgtactagagctctggctgctgggtctaggggccctggctgtctggccctgctcctgctgttccttttcctcctgctcctcctcctcctgctccttctcctcctgctccttctcctcctgctactcctccttctctttctcctcctcctgctcctcatcctcctgctcctcatcctcctgctcctcttccttctgctccttgtcctcttcttgctcctcttcctcctcctgctcctcctcctcctgctcctcctccttctgctcctcttcctcctcctgctcctcctcctctttctcctcctcctcctgctccttctccttctctttctcctcctcctgctcctcgtcctcctgctcctcttccttctgctcctcctcctccaactcttcttcctcctcctgacccttgttctcctgcttctcctccttctgctcctcttcctcctcctgctcctcctccttctctttctcttcctcctcctgctcctcctcctctttctcctcctccttttgctcctgcttatcctcctcctcctgctactcctcctgcccctcctgttcttcctcctcctcctccttttgctcctcctgttcatcctcctgcttctcctgctcctgctcctcctgcttctcctccagcagctcctcctcctcctgtcctcgctttttcttcatctttgtcttcttttcgtcttccctctctttttcttttgaaatcactatggaccacaataagttgtcacagtagtgcagaggtcccgagtacctatcatccagtttcccccaatgatgacttcttacatcatgaagcaaggacattgattggctccagatcatcaactggattacagctcttactcttatttcaccagtgttcacatccgctcatttttgtatatttttgtatctaattccatgatgttttatcacatatatagattcgtataattaccaccacatcaagttccagagctatgctgtcactatgggggaaagcaccttgtattcctccttgtagtcacatgctcctcctcttttctatgcactagcaaccactcccctgcactccatctctacagcaatgccattttgaaaatgctatatcagtggaatcatgcagtgtgtaatcttttgagatgggcttttcttcacttagcataattcccttgagctccatccaagttgttgcatgtatcaacagttcgttccttttttgttgctgggtagtattccatggtatggatgcaccacactttgtgttaccattcaccagttgaaatttgggttgttttcaggttttagatatttatgtatataaagctgcatgagtcatataactggctgaatacatttaaatgaatatcagtcatgcagatcttttagaaatgagctctctgaatcttagttaatagaacaatatacatatttcaaggagaggtctttcctacctacctacttcagaggtttcttaaaggggtgtctgcaaaactgaccatctccagttcacccctctgatatcttcctatgatttccagacttatatttaggaagaccaaggctggtccttttctgttagaagtcacctgtctgaaaaaattctagctaccaaaattggtcatcggctaagttcattttcaccttggagccattgtaaatcttcaccttgtcctattgccttcgaaccactctctgacattatgatcctcattgatttgttcccttgtttgttgactgccccatgagagcttcataagaggtagactttgccttgttctctgctattccctagtttacaattgaagggccagacacgggacaggtgtataataatgtttgtgaataaatgtgttagtgaattctatcttcaatacagaaaagagatttgtaaaagctctccccaaaagactggatttaagtaaatataaatagagcttgccaaataaatagagtgaagggaaaccattccagggcttggacttagaaagcctgagtcagaacttcagctctgcctcttactgtcttggtatctgtaggaactgatctaatttctttgccaaagtcatctcatttgcaacatcaccttcttcacaagataactgtgatgctcaagtaagtcagtttgtgtgaatgtactttgtaagacactaaagtgctgtataaatctaagggattcttattgccatggttatcacctcctccttctctctcctgcttccctccttctccttcatcatcattttcaccatcatcatgaccatctgcacccttggaaggataaaaagcatccaggcaactgcaaatatgaaatcttggcattcttatgacattccagccagtagagggcaacagttcctacctgctaagtacaatgtctttaaacatcaagttgaaatatgcatggcaacttatgatcatttatatgtctttatttttaaaggaaacacgctcatccaccctaatcattcttccattcagcaattccttcccagtatttttgttcagtacattgccttagcacaaacctcttagaaatgtctggctgctgtgaaagaaagtgattttatttacttattatttcaatgggatttgcattcttgtcctcccttcctggttgcctgggtgagatgcagtgcaaaatttggctcaggagtgatgatacaagcatgcttctcttttcttgacactggcattagaagatagtgtaattgcttgtgtttgattaggttctctgagaattctgtcactctttgaggtgattcctatattccctccttgctagactgtcgctgtgtgtatttcaccctaggactggtggagagagttgttaagctgacctctggagtctatctggtacagtctgacttccccacagtgtgtatcagcaggcaggtcattggtgtagggacagacagactgggaagttgctgaggcactttactccagaaagtaagggcagctgggtttttttcttttctgtctctggttcttgaatcaggatggatttttgatatactgcttaaccctgctgccaggggacccaccagggtaaagcagcacccacacctcaggataagcagaaagaaagagatacacaaggtagcccagttttttccatttaacaaaagccagctggggaataatcaaatattaacatttgcttactcactttaaagaggatggtgtttgtttcatcacagggtagagaggggtggctgtgccgtcctggaatgctttttttttttgagatggagactcactctgttgccaggctggagtgcagtggcgtgatctcggctcactgcaacctccatctcctgggttcaatcaattctcctgcctcagcctcccgagtagctgggattacaggcatgtgccgccacacctggctaatttttttgtctttttagtagagatgaggtttcaccatattggtcaggctggtctcgaactcctgaccttgtgatccgcccaccttggcctcccaaagtgctgggattacaggcatgagccaccgcactcggccaatacttctttttttgatggaactctattaaccttagcttcacaccagccccttttattaaggagaacaccatgatatttaaacaagaatgtttacacatttgagtatcagtcattcactcacttatcccatgtctatagaaagcctactataccctggagttagagattcaaaatgagaaaaaaccaggacccttccttggaataactcccagtctctgggggataccaatgtaggtcattaatgtttacagaggagtaggtggtgtaacccagccaagagcacagggccatggcagctcagtggaaacggtggtttgctctaccagccagaggcttctaaggaaacaccattggagctgtgtctatgcagtatgaggcatgttttggggtgaatttttatcttgttttactccctaaacaatcttggatcatatctataggaatgctgactgggaaggatacagtaaattctgattatcattccccatccaagtctcacccagtttcacctggtgtacgttgtgattaggtttggcagtagcgagttcgtgaccacgttgtgacgtgctggcatatacttcctgagagttaaggatgggaagccagatctttactttagggcacctttgggaaaatgccagcttggccaagccgagaaataacaaactttttttttttttttaagtagagaccatactcacttctccccaggacagggcatgcctcttaatattttgccatgatggctttggggccactaagaaaaagtgctgatgtagggagaggacactgcaagcttcagatcgaaggggccctgccccagggaaaaaacctcaacttttccactgaagctctatgtgactgtaggtcatttatcttgacttctctggagccataatgtcctgtatactgatttggtccttttgcaaagcatcgccttctcagtgatgattcccaggatatctctaagaaagttttaaaggcaaaggccttcttgcaccttgcatcctctgtaactctgagcctgctctgcggagtagtgggtattgggctgctactccttggtggggaaagcaaacaggctgacacatcagcagagtgaccaaagctgcataccctccaagatgtgatccagcctggagcagagcctggccccagggactgcacagcccacactcctaggcttggaacatttcagactcatgctgacttggctctggagctggctgtagccagctgggacactgaaccatttgcttgttctgttgacagcccagaagaactggagccctttgcctgtgggtgaagtctaaatttagccccaaagaagttgccttcccattttgctggagaaaagctcttttcacgggaatgggcctctgctttgattaagtgggaggacccacatctgggaatacataaactttattgtccttggatgacaaaacggtttccttgcctactggttttccgcctttttagcctggggtgtgatcatctgtgcttatgactgtgttggccggggcaagtcatttggctgtggccagggctcccgatcctgagcctaagctggagtcaacacctggggatgttgtcttgtccccacttcacctcctgaggcccagctctgtaagtgcagatgtgacagagagcaggagtctgggtctctgtgaatgatcctgggagaacatgaggcccaggtttgtacccctttggaccagatcctggtatggcaggaggcctgaaacatcccagggcttttctgtaaggcttcagggtccaaggtcccagtgcacaccctgagcccatgctagagtgaacacaagagttccatcttgaaaagacaccagccctaaggggttcattgggaaaggcttctagaacccctcctggcccagaataggccccttcagtgattcctcgccctagaacccccctgccattttcatcttgtttgaatactttggggagttgttgagtgaatattctcttaaaagtcagttctcctagggcacgttcagatccctttggatcaatgtttcctttgttgttcaatgatgcaggatctggttaccttgtccatgtaagaacttctgaaatgtaaggcaaagagcactggacctggattcagaacaactgggttgctgggtggtctggctttattgcttattagtggtatgacattgggcaaggtaccttctccaagcatctgtttccttgtctggaaaatggcagtaataagaccatattcacagctttgctgtcagcaacaagtgagaagatgttacacattttcaaatgctctttgtaaaagtagattgcattctctactaagtaatcttggctggtagcaaatgtttgcttggatttaactagttccttccaccgcatggaaatctcttttctctcaaagagtaccctaaaggacactgggcgcttattagatcaagggaactcctgctttgtttggaccttctgtttccacttttgttttctctcttgaatctcactttgttttccgaagaatgatggtgaggcggatcaagatgtcataaccttttggattggttcagcagatgttttgctcaatatccataagcagattctatctggcctatctttatagttcagtttcttgatctgtagaatggataccacacccataagcaggtcttgagaaatgatgtagtgggaactcagaaaggcaaactgtaatcatttcaatgctgtggtcattatacaagtctagcatattttctgatcagaacctagcatttggccatgtttccatgctcttctgcacaacactcaacagtaaatatgcagtatcaagttttcccatttaataagaattcatgggatagaaagcaattaggctaggtctaaaagaaattaggctctggccaaggaagaattggagggataccctcttgctgtaattttccaggatgccctggacatccccagaagtcattagtatggaaagatctcaggaacattttataagctagtaaaacatgcttgaggggtgatagattctttagaatttatctgcatggctgacgtcaccctctcagcacagggagccaaactgtctcgatgtctgtggcccgtttctgaaattatttcccagtagttaatcccaagtgacccttaagcccacttccctgtcagaaagtgttggtttgcaatgagaagtggccctttctgggccaatgaggctcctccttccagctgaaatagaagggaaattgatggcttctctggctgaggacttctcccctgcagacccatgtctggactgcccaagcttcctagtttaagtctctttgtctcagctagttgtagtgactgccaccctcactagctgtacccctgcacagggggctggcatgatttttggctccctgcttacaggactggaatgtggtttccttcagcagtagacagggaagcagcttgatgtctctagaagcttgtttagtctccagctttgtggtagttgacgatgtcacatcatcttttctaagttttagttactgcaaaatggtgtttatttttatttggggatttggagggaaaagagagggcaaggaagagggaaaccaatgaatatttactgagcacttactatacaccaggcactgtgcttaaacattttaatgtacatgatcacttagttcttaaaacaactctctaagctaggacattacaaatctcatgttatggatctggaaactaaggtttggagagagaaaaataaaatgaagagttatgccatgcaatagactgaatgtgtatgtccctacaaaatgcatatgttgaaaccctaaccccaaaactgatagtattaggaggtgcagtctttgggaggtgattaggtcatgaggaagaagccttcatgattgggctttataaagggaacgatcttaccccttctacggtgggaggacaaagcagacaggtgccttctatgaatcagaaaagaggcccttatcagacatggaactggccagtgctttggccttgaacttcccagcttccagaactatgagaaataagtttctgttgtttataagccacccagcttatggtatgttgttacagcagcctgaatgagctaaggcatatggctttgcttggatagggggttggcttctcaatagaggtggtgtcatgttgtgctgggaagatcgggacaatgattccaatggcacagtaccagggacccactgagatcctacttgacaggtccagtcctatcaagaggccaacgtgaggcaacctaaaagcatgatggggttttctaggcaaaccactctcccacttaaccccgttgccccaaacattgccattcctcgcctctgtgacagggtgactcttcagagaccagcggctgtcagaagccgctatagatccccggtgctgggagccagcagtgttcccagatctttatgttgtccagaccagcctcagcaaccaggccccgctctccagctgcccaagccctgggggtgactcatctggctcctgacactgtgcatcagcatgcccttctgcctgctgctgccccagtgtgaccacagctgcctcaggggatggcggaggctggctcctgacccaggctgctggcagggagtgtcctggaggctgcgcgctcagccggcacgtccccctcattccgccagccctgcccaccttcctcgcctgcagctcaatccccatgactaagggtgtggaagaggattcctttttccacaagcccatgactgagctgggacaggagggatctgcagtcccccttcactcagagacagcaaagatttttatcccccagagacaagaatcccctggctgtgaagtggtaagcctggggagcggctgccgccacctgtcctcagggaaggtctgccactctccgacctgctgttgacctgaactccagggacagccactcccctgccatttgctcctgcagagagtgggacggatgacgtcatggcatttttggagtgctgaagtgaagttttgacaaattccaagggacatcaaagtgctgaacaacagccaatacatcatagcctgtcaccagggcccccacccctgattatcacattaaatcagccggtgggcacatttcagctgaaactcaacagacgcctactggaactcacagtttctccttccagagttcaacaaatatggcaatggttacattttaaaatctgtgttttctattctacattcagtctctctcacacacacacacacacacacacacacacacacacacacacacaccatgttactaactaaaaaacagaagcatgctgctagagaatacctgataactgggattatgacatgcagtagaatagaatgctgatttggattctaatcctagctctgccacttaatagctcgatatctttagcaagttagttaacacctctgagcctcaattttctgagggtaaaataagcataataacgtttctatttccaaaattgtgagcattggttgggagagcagttcaaccttagttcttgcctggtaactgtggacaatgttttctagtcataaagttttgtatttatttcttgatgtgtttattgtatgttcctttttgaacataagaaagataagacattattttctcctccaggtttgccgagaagtgcttgtgggtgagctgagggtagggcatctgtggctcagttttcaggctatggaggaaatatctgctgggctgctatttccctgcataagttctcattgcgggagggagcagaaggtaatttcagaaagagcttgtgctgatctttcgaactgtttctcccaaattctggagtatccaaagaaagcagggttatctgccagaatgtatcagaaagatagcaggcatgtgaattctacattaactatagggcataagaaatttcatgtttcttttattactttaagctaaatttgatatgccactgtagccatcctgccaggatggtaggaaattcagttgcagactttcctgaaatgccccttcctctcagttcctgtggccactcgcccagatcgtttggatagagtcctctggtcttcggtccacaggggtgactactgatgtgctcatctgctaagtcctcatgctcctgggaggctggtggctccaccattccttggcagagctttgccattgctacgatttctccctgaggccctgtcacctcccgagggttgccagagaaggagagcctccacacctgggatcacagctcccttcccttccagtcccggggagacactagaatcctttgaaggttcccttttctatcaggactgtctccttctccaccttttggagaagatgaagggtaatctcccttgagagagcctgtggagacacaatgatggcctctgttctttaggaatggggaaaagataagttatctaggttaactgggattaactaattctgttactgagctgggtgacaagatgggattggggaatttgtttggggactcagtgaggacatgcaggagacagattcaaagaatcacatgtgaaatggacagggctctgatccctctaaaatatctgttgctttccttcttccacttcgacccctatcccccataattcttctgtctttttttggagacagaatcttgttctgtcaccagcctggagtgcagtggagcgatcttggctcactgcaacctctgtctcctgggttcaagagattctcctgcctcagcctcccgaatagctgggactacaggtgtgtgccaccacgcccagctaatttttgtatttttagtagagacggggtttcaccaggttggccaggatggtctcgatctgtggacctcgtgatctgcctgcctcagcctcccaaagtgctgggattacaggcgtgagccactgctcccagccaattcttctatctttaaaaggtaacccaggttgggagggaaggctgggagcacagcagaagacagaactgctttgttgagccccagaaccggcagcggatactccctgccaatcacatggcactcacctctttgtgtaaatttagaaggtgcttgcccaggaacaatctggcttgactgtcacagccatcctgcaaggtaagtggggcagtcgttaaccccattttccagataaggaagctgaggctcacattgattaaaagacttgcccaaagtaaccaagctgttgaggggcaaagcagcaggacatagcatccaggtctcttgacttttgcttcaagagcccacagccacactcggtgcttagatgaggctttggcttatcagtgatttgtgatgtttgccttttgccaaagagggggatggctgaagagctagtgccctgacattctggactcttgccagtagattttgtctgactcttgctctgatgctattctttgttattttcaggaaggggagctagatgtagaatacatttctttttcttggtaacgtgaacagcaagaagcaagtagagtacatttcttatgagagaatatgctcgggactttgattcatatctggtgggtcccaaaagaccagggtactgcagatttaagaccatgttgcaaattcggcatgcattcaataggactaccttagtgaggggagtaattttataaaattatcaattcagtctcaaagaataatagcaggaaatgtatttctgactatttagaagtgactcattgtgggactgtttgaaaactatattatttttatcagtaaatagaattgcctatagtcaatgttatctcttcacatccagggattctaagatccggttacccatttccctcaaaacagcagatagcaaagccagggaaatgaaaacccaccaaaccttctgcaaggctgacaccacccctaaaccccactgcaaactgataacaccacaccctcctctgcaaaataacagaggggcagataagatgaaaattttcattccaattagcaatcatttccagtcagtgaaacggcagaatcagaagaggttccacaaccagaaaatcttggctggaatttcaccatcaggaataaaacagaaaaactaaaagagtgccccagatagcctttcttaggggcctgtgtcaggtaagtgcttttgaatatttaaaacaaaggatggctaagagttctgcagtcattttccagttaaatatcagatggtataaaatatttttatagaaagtacaggccaggtgcgatggctcacacctgtaatccccacactttgggagaccgaggtgggcagatcacttgaggccaggtgttcaagaccagtctggctaacatggcgaaaccccgtctctactgaaaatacaaaaattagcctggcgtggtgatgcacaccaataatcccagctaggtcaggaggctgaggcatgagaatcgcttgaacccgggaggtggaggttgcagtgagatgagatcgaaccactgcacctccagcctgggcgacatagtgacactgtatctcaaaaagaaaaagaattcataatccacttttcattagctggtatttggccttaccaaggtgaagcatgaaaatgaaattctatctgtatcagccagattttctcagacacatgtattcactgcatgacggaccctggtttccaaattgttaagcataccagactctagtgaatgcccttccgaaagggccatcatgcagcaggccttcccatcggagagccatggtcccagccaaggcagctttcaggggttgctccaccactctagggaggcggcccagatctgtctctcccaaacagtgtctgggtttgacacttcctgagaaagcagagattgttccctttgtatgccatggctctggaatgcagctcttcctgtaaggaagacaatggtctttatgggaaggctaggacttgaaggaggtaagatttgaacggcagagctgggtgctagctttcctgctgagggaaatggtgggcacagaacccccgcggtgggcaagctggggtgtgggtgtgcctgtgggctggcaggtgactctgcccggagcatcgcaggggtggggaagagatcaaggaggtaagaaaggtagtctagggggaggggcccagagttttgaacaccagacttaggaatctgggacatacgtactggcctttgccattcaaagtgtggtcctgggaccaacagcatccttggacttgaaagcttgttagacacgcagaagcccgggctcaccccaggcctgctgaatcacaacctgcattttaacaagacccccaggaaatttctatcctccttcaagcactgctctaggctaagaggaagcaagaacaatttttagagctggggataaagtgatgggaggagtgtttgggaatgaggccactagagtgcttagagaacactcacttgggagccccacaacaatgcaggcgtgagtgaaggaggggggtggggggctgcgagggagacaggttttccccacaagccacaaggcccgaggcacgcctcctgccctgcctccacctcaggtcgcaggaatcttgttggtgatccatccagatgttgtgtgttctggaagtggacatcgcggctctgtgtttttgaagtcagatctcattgctgtggtttctatgcctgaccccccgaagttcttgctcctgttgccacagggagccgggagagcacagagcgctgctcccggtgccctgcagccacacaaacatgctcctgctcctggcggaggcagagctgctgggaaagacatttcggaagtttcctgtggctgcaacaaattgttcaaatctgcactggagcaccgctgtgacctgtctttctccatcttagggcaaacagctcctgaaactggaaactccccagcacctcctcaccctacccctcaggctctccttgtgggggtggggcagggggagttgtctggaatgcctggcctctctgtccaagcatggcagccttgccccatgggtggtgcagactcagtttcccatgcaccttgccccagggaggaggtaggggttccttccatagagatggtgaagaataagggaggtagtgatcgtctctgggatccagttagatctgcgtttgcaggcagaaagaggctggggcacatggagagagtgatcaactggaagattctagggtcctcaattttgaaaggtgacatgataccctggaaagggcatgaacttagttgtcagttcgtccttgccttttccaatcaatgctgtgtggccacggcaaattaatgaacatctctgagtttcggtctcctgtctaaaatgaggtgataatagcttcttgaaggttgtaaggccccaaacatgctgcctggcacatagatggctaatcaatattttcctacccttcccttccttcccttctctggagttgctacctgtcttctcctggggccttgcaaataaacttctgaattaaatagttcctgcctggtaatttgtatcaactgagggaagacaagtctggaatattacttttttttttttttttcagacggagtctcgctgtcgcccattttgagattgagggctacacttaaaaataaatgtaaccattggctgaaaccagaccgctttctggaagggagtcttttggggcttccttcaatgaacagacaggagtgtaattagttatttgatagcaaatgggttctctcaggacataaatacaatttaaagcagtttgttctagtgtctacagtttcaacattgcccgttgcattcatgtttctactcttaacttgccaagtaaacccatagtttgttagttccaacactaatctctgatcagtcccatttattctaaatttgttttcacataatggcttccacaactcaaggtattttctattctttgctctctggagactgagaggttatcagttgtggaaagccttccaggaagttttcctctaatgtagtcctggggaatacagaagccgcctcgaatgaatggtcggactcaccttttcccaggaccataaaaatatatatttttgtttcctaccctaaacacagtgtaactcactccttgtttttcctgggagattgtggtaacacggagaggcctggggggtctctgggataaagcagcttgtaaaacgactatggggggattccagatctgacttaatcaacatttctcaagatccgtagaccaataaaactgtttgctttcttaccacagttccaccggctgatttatttctcttacttggctgaagctgtcactgctcaaagcagttcatttgtcaggtcgagagaattacaattcacaggacctcttgctagtgctatctcagtttataaatttcacgaatcacaatttattgcggtgcaccccacagagtctcctattaataaattgtggctcatcagcaaaagcacgtgtctatggctcccttggatataggcttagggtcctggagcggccgcacaagctgcatgtggccaacacacaaacgtagctgggccggctcccgcagcctctgtctgagtctccctctacttgcaatgactctctgcgtggcctggtttcttgttttcacctctgcagggatgccatgtaaaggaggccagacaccacctgtgtatgtttgtgttgtggtggggagggccgggccataggaagaacttaattccttccaaaatctacagattttcctctaatagatttcatcaacctgtgggcacaaacagaattgcattaataatgcaaaccttttgttcactgactcttttccttcccagccaccagcacttcagctagagctttctggaagtccttggggtttttcacatgctctcggaagtgaggccagtagtgtcttgcccaagtagtcaggtcggctcctccaaggcattttccatttccttccttccccctgtgctggcctcttctgctgggtgtgtgcagttcccatggggcttgctatgtcttccactctctctgtctgctactgacacctaagtcccgactaggggctgcactttgttcccccaaatccataagtgaaatcctagccctcagtacctcagagtgtgactgtatttgcagagatggcctttaacatgtaattaagttaaaaggaggttgttaggctgggccttaatcccatataactgatgttcttataaggagaggaaatttgggcccagacacacacaaagggaaagatcatatgaagacacagggagaagacgctcacctgctagccagggacaggggcctcagaaggaaccaaccctaccttggaagaagttgacaccctgatctcagacgtccagccttcagaatggtgagaaaatatatttctgttgtggaagtcacacagtctggtactttgtcatggtcatcccaggaaatgattacaatccactaccaagaaatgtctggcaccttcatgacgaccaagctggatgtcaagtcagggatgacagcttgcagcttctgctgatgtttgccctcggagaggagcccccaaaccctgctgtttgtgccgatgtcattcagtgtttgtggagtagcccaggggtctccaaccccgggaccatgtatcggtaccagtctgtggtctgtggcctgttaggaacagcaggaagtgagtggcgggtgagcgagccttactgcctgagctccgtctcctccagatcagctcacctgccccattagattctcataggagtgcgaatcctactgtgaactgtgcatgtgagggatctagggtgcatgctccttatgagagtctaatgtctaatgatctgaggtggaacagtttcatccagaaaccattgcccccttcccccctagtctggaaaaattgttgccttccctccctgcatgtgccctgtgccctagtatctctggagtcattttcccagaagctatcatgacttttagttagagtgagaggctggggtcactcagggcacccgggaatcacagtgatcctatgtagtgggagctggatccgtggaggagatggacactgactgaagattccactccaggctgagagaggagagaggaagttccctggctgctctcttcctcccaccctcagactcttgtcagtgtctccttggctgagccctgctgggatctggggcagctggggaaacacagccttcaggggtcagcccctgccatagacagcagagcaggaaatggttgaggagtggctctcggggcaaacaggcccaggactagggttcctttcgtagctgtctgttagtttcttgtggctgctacagcaaatgactagacccttggatggctgaaacagcagacatttactcccacagttctggaggccagacttgcaaaatcaagacattagcagggctgtgcttcctttagaggcttcagggaaggtccttctaatacctccttcaggctctgctgactccaggtgcgccttggctggggctgcatcactccaatccctgccgcctcctgcacatggccttctcctttcctctgtgtgtctctcctctgtgtggcatctttctctatgtgtcattggacttagggcccacccagattgcaaagatcccttatccaaacaggccacattcacagcttttagggcttaggatgtgggcatatcttttgggggccaccatttcacccactgcaacctccttaattttgttcaagctgttccttcaacctagtgtcccctaccctcctccttctagaaaaatcctgcaagtctcctctcaagtgtcaccttcagcatgaaaccttgcctggactacatgatcagacccacttaccatctctcctgggcccccatagttccttgttcttgtgcatggcacttatcgccttgacagtccactggcagctcctcaagggcagagcagggcctgtggcctctgctccaagggccaatgtcacatctcagttcctttctcccatgaggaccaaggcccttttgtctgggttccagtcttctcttcttgttttgggtcaaaacagcttccttacaccctcctgagcctcacgtggctctgccctgcatctgctggacactcaccaggcacctcataagtctgggatttgtctccagtttgcctgaaaccgcctccttcctggacctacatcacacatggctgcccagagcagtcctcattaagaagtactgctgttgatgaagtcttgtcagaaacaagcctggtcaggaccagaagtggggaaagaaacagtcgatttagattgtcacagtacttcgggtagaggactttgatctggaatcgggataaagaatggggctataccctaaaaattcatttaaagctggtaggtgtttttctttagcaagcaattattgtattttgttctactaagtattttaaaagcctcctaaattcctgtagagataagctttgtttacctggaacacttgggaaatgaggagcactattcttttaattttatggtaaccaaaacccccttttgggttttaattcttgttgcaatgttgccttaactgcatatatcttttctgttttagaaagcagagcaaatgggatgcacgctttttgctcacgcaaagaggactaggggtgtagctttggaaattgagctgagtaatcttgggtcatgaccttaacaaaatattaaccaggtgcagttgctcttgcctgtaatcccagctctttgggaggctgaggcaggatgattgcttgagtccaggagttcaagaccagcctgggcaacatatatacatatacatcatatacatatacatatacatataagttagcaaggcatggtggctgtagtcccagctacttgggaagttgaggcaggaggtttgcttctgcctggaaggttgagaatacagtgagccataattgtgtcactgcatttcagcatgggcagcagagagagacactgtcaaaaaaaaaaatccttttttttttttttttgagatggagtctcattctcgttgcccaggctggagtgcaatggtgcgatctcggctcactgcaacctctgcctcctgggttcaagaaattctcctgcctgggcctcctgagtagctgggattacaggcatgcaccaccttgcctggctaattttttatttttagtagagatggggtttctccatgttggtgaggctggtcttgaactccaaacctcaggtgacctgcccaccttggcctctcagagtactgggattacaggcgtaagccaccgtgctgggccaaaaaaatccttttcatcaacttgttttttggagcatttatttttttctccaaaagtggaggacagaaaacagccaattaagcgaaggtttcttttgctgatgtctaattttggcttttcttctgaagtgctaagaataatttctgagcagtaatcaattgcatctctatagaggacagacagtattataaatattgccataagaagaaagttttggccacttctctatgtttccttctatttcgctactggtagtgttaggggtgtgtgtgtgtgtgtgtgtgtgtgtgtgtgtgactatgtgcaggtgcaactgagttagcctaaggtgaataaaccctacaatggactgaatgggaaaagcagtggattaaatgtcagaaagccaggactttttatccttctctttattacttaccagtgctatgacctttggcaagcacatttagcatgtctattttctcatctaaaaatgggagtagttcttatctcaacctgccttataggattaccgtgggaatgcaatcataaggtgtgaaaatgcttcataaagaaagcaccgtacagacttcctatgacattactacgacaccaagttctgggaagaaaaggggagagttttctagaggaccactcttggtcattcgtcttgttgccattttccttcccaacaccaatcctgcttttgtctcactcggtttgtgtgttgggctaatcacctacaggctacgtcatggcctcatctccagccttgctcctccccctcccttacctgttctttctacagccagtcctgcgctgccagccggctccaccctggtacacagccatttgttatgttccaggaagaagctaaactctgctccctttcacccaacataaaccttgatgtctcccttctgtcaaaaaaaaaagaggattagacgccagagagacactatatatagtttttctttgactgctggaaaagataagtgtctgacaagagacaggaattgtttgcctataaattgagtgccagcaggtttatcgctgaccgctgtagattatgttgagtggagtaatcagaaggaagaatgggaggctacaataacactgtgatagcggcgatttggactccacaatcaaactctccttgacttatgcaccctgggtggaaagtacttatgttacaaaacaacaggaggtcctggccctgagttacttatgtgtctcacaggcagtgaggcgatccctcgcctgttagattggtaagctccttggctgggtccgatgtcaccggagagggctggacgggatggtggggatggaaagggcttcctcccacagggcatggcactggcccagagccggaatccagagagctgctgagaagggcagtaaatgcctggtgcagaataatatttgggcagggtgtttcttgaaccatgggtggctggtcgttttctatgcttccctcctcctgcaatcctggatgctgcaggtgataaataaattcttcagtcctagtggcgcccagtgtcttcttggaggacccgggctggcccccagatgaggtcaccatgaggtttacaaatcacattagtggagcccaaagggctcatgacaacttccgtggattctaagtcctttctgcttggttggtgcactcatatggtgctgtggtctaagaggtgaggtcccctcccaaacagtcctgtgaatggcggggaggcactggcgtggccagggagctgcgatgactctctgagtgtggagctcagtgatgttaatgctctgccagcaagcgtgcatcagctccaggagactcctgctcccccaacttggcagtgggtttgctttcttgataaatcaccctcataaacaattggatttggcccagataagtgtcttttgatcatgtatgctactcccattatgcctcatttgtgactccagcgggctcacaaaagggacagactcagtccctagtaaaatggacggtctgcattcgccgtgggattctgtggggtgaacagcctcggtactgttaagacaagacatggtgtcagaaggaggagcccatgataggtgcctcttccaaaagccaaagagttgaattcagtgctcacaaacctcccaggtgctcctcactgtctttgaaatgaagcctcacctctctctctgaagaggcatcaaggcctcagcctgtctttccagcctcatctcttgccactccctgcctgcagtgctgcgcgcacccctccagcactgcccacattctttcagttcctcagcagttcggtgtctgtgctcatggacatcactcatgctactcccctttggctcaaacacctttctttctggtgagcttctactcatccttcaaaacctaactctagggcacccttattctaacttcggggtccatccatcctcctcactgacactcagaactacaatgaaatatttccttgtctgtgctcttcagggcaggctgcttatctctctagggtatggtctatcatctggcacactaggtgttcgctcaaggcctgttttccccactgaatactggactcctccagggctgagatcttgcttgtttaactttacatactcaataaccaaccatgttagaatctcaatttcctctgaactaaaataatgcacctgtaacaaatgtgacaaagccaagtggcaattgccgcttactcactgaacacctatgagggtaaagtgagataattcacagaaaagcatgatcctcttccacagcaccttatggtacattgccaataagagtaagatggagtggcagtaagatgggtggagatatggtttggctgtgtccccaccaaaatctcatcttgaattgttcccataagccccacgtgttgtgggaggtaccagtgggaggtaattgaatcatggggtcagttaccctcatgctgtttttgtgatagtgagtgagttctcacgagatctgatggttttataaggggctttccccccttttgctcggcacttctctcttgcctaatgcggtgtaaaacatgcctttcgccttctgccatgaatatgaggcctccccagccaggtggaactgtgagtctgttaaacctctttttctttataaattaccccctcttgggtaagtctttatcagcagtgtgaaaatggactaaacagttggagacgtggattgagagcaggggagagaaggctgaagatgcatcttctgggaataatcctgtgcctttattttgattgtttattttatctttcatcagaatttcttaacttttattgtcactaccaatagtgtaattgcttggctgcatgtcattgctgaggggagcaacattgaattgacaatcaagacacccagattcaaatctagctctgccataaatcataaatcatctttgttagggtttccttacttgtgaagcgggtgactcggcccggtaccatcttgctgactaaacggttttacagataatgagacaatcaactgaagagtactagatagatcccaccacttgccaagcattttgctgggatctttacatagtttatttctgtagctcactcttggctatgagatagactccatcattatcctcattttactggagagggctccaaggtacagagggtctccaaaggtgaggcgttgcctaagtagcagaaactgtgaaactgtcttccaaagtggtggtatcagtttgcattcccaccagcagtgaagcagcattcctgttggcccacatctttgccagcatgggtgtcagtgttttggatttcagccattctgataagtgtgaagtggcatctcgttttgcatcagggtgtgtagcagggtgtgatttaggctgaactctaagtccagagtcaggcagctattctctgcctattgtacattacttgtattttggatataaggatgcacaattttctgctacttttaggcatcatgaaagggcccatgatctctgcaaaaacttgaaatacctaaatgtcatgtggttgccaagttttgttcatctaatttcatcaatagaactttcctttaaatggtctaggaagtctgtgtctagtttatgctccccactactgccaatgtgatctttttcaaatagaatctgatcatgagtatcccctcttcagagccttcaggccctccatcaaaactccaatcaaaactaagattttaaatgagaatttcaaggccccttatgattcagctctcacatacatctactgtttctttcacttttctctccccaacaccacctcaacccccaccctgctggtgccaccaatccaatggacaagctggaagtagcagtgcttcctctaaacccaatatccatacagtgtgtgggctcagttaactaggcatggattctccttatctaaaggatttccccacggactttccttctcagcctggcaagctgttttattattgtacaccttgttaagatattatttcttcttcaaagatttatccaaccctgaaagaaatttctaaccattctctttgtggtaggcatggctaattgcccaatccacatttcccccatctcttctttctcattttctgcattagtcatgagttaatccattgctacttaacaaattagccccaaacttcattaaaacagcagcaatcacttatgatctcatgccatttctgagagttatgaattgctatggtgtgaacgtttgtgtctccccaaaattcatatgttgaaattctatcccccagtgtgatggtattaggaggtggggccttttggagttgattaggtcatgagggtggagccatcatgaatgggattagtgcccttatgaaagagaccctcttgccccttgtgtcatgtgaaaatgcagcaaaaaagatggctgtctatgaaccaggaagaaagcccttaccagacactgaatctgctggcactttgatcttggacttcccagcttctagaaccatgataaataaatttctgttgtttataaactacctggtctatggcatttttgtaatagcagcccaaacacactaacacagaaatccatgagggggttagttgggtgattgtggctgaggggctcatgacattgcactgggttacaactggggctgcagttatctgaaggcttgatggggctggaggaactgcttctaaagtggcttgagcacacagctgatgtgttagtgctggtggctgacaggaagcctcagttcctcaccacatggacctctccatatagctgatggagtgtcttcaccacatgatggctggcttgtcccagatcttcctttctcactgatctccaattttgttcagtgcagcaatgtgcccactttataaaattgaattcccagctcacttgtgcctggtggccccatgacatcattctagccgatgaggtgtatgtggatgtctattgggtggagcttcctgaacagctcttaatttcctggttaaaagagacagtctcacttggtacatgccttttgaccttcactgttagctgtttttcatgcccacaacccacattcgatgtctggatgtgcaagcagtcatcttataggcataaagatgaaagtcacaaatgacggatggtgggggggaatgataaagggagtttgagacctgatggcttaatggagcttctggtgctacctccctggactgactacatagctctgcactttctgttatttgggaaaaatgactcctatttggttatgtcactgtttcttgctacgtgcacctggacacaatcctagtcccaatacattcctttgtcatcttctgacttctataattacacagtacatcacactgaattttcattccttatttacgtaggtttctcctcaactcttcagtgaattacttgagggcaaacattgggtcagacttagccttgtacagtacatttttattaaattgatgagtttatatttaaaataaacctttaataaattcttcgaacgtttccctcagagaataagctcaatcattctattggtgttcagcaaatcttgtctcatcctgagcttctttcccaccagtgccaagacctgggtcagagaagagagacatcaaaggcagccgagggggtggggagggaaagacctgtttgatgtgaaaatagagggaggggtctttcgtgggttgactacaaagaagcacttcttctgtgaaagtggctgctggctcaccaggtcattgtttttgccattcaccttgcatgggtcagaggacttgaagatagattcccgcagccagagagtctacaatcatcgcaaacatgactctaacctgtcactgccccctgcccccttttaaggcctctccctcaaaggataagaagggaagagtcaaagttgattccagggtgatgaggtgactaggaggatggcttgtcattaagagaaataggtggtcaggggtggggggcagagacacacaatacagtggggtttcttccacatcccagtggtgctgggcagcaggccagcagggaggtggctcggagagttgtcaagatggaagtgatccctggaaatgtggggaggaagggatcccccaagggcattttctgcccaagtaaagcaaggagagaaagaggagagggccagaactctgggaaatctctaaacttgggcgaatcaagagaaacaaatgggatttttagggcagtggaacgatgcgattctgtagtggtggatgcctgtcattatacatttgtcaaaaccaaaagaatggacaagacaaagagtgcaccgtaatgtaaactgtgggctttaataatattgtatcagtattagctcatctattataacaaacgtaccatgctaacgcaagatattaataatggggaagttggcaggggtaagggggagttatgtggaaactctctgtgctttctgctcaatttttctgtaaacctaaaactgctctaaaaaatgaggtctattaatttaagaaaacccacaaaaaatagagaaagaaaaacgggaaggagaaaaacaaaacgagttcagtcttggatgccaaaagagaagaagaggaggaaggcgaaggaacactctggattaatggaactgacatcaagtcaggaatcagaatagcctctaccgagccatttactatgtgtgaccttggggaatccacttactacatctgttatgtctgggattcattattactgttcttacctgtgtaataactgtgtaagacattagagtgtttccccaaacttggtaaacataccaaaatcagttggtggttttgaagatactggaatgtgaccttcaaaataatattgaatcacacagtaagaaagtaatctgcttttcagttcaaatttggtgaaatacaaagtttcaatttgatgttagtatgactgtaatggctttgcaataattaactgctgagctcaatttttattgtgataaataaaatatatataatataaaatacatataatataaaaatcaccactttaaccatttttaggtgtacagttcagtagcatgaagtacattcacattgttgtacaattattatcattatctccagaacttttttttattttttgagacagggtctcgctctcctacccaggctggagtgcagtagtgtgatcatagctcactgcaactttgaactcctggcaatccttccatctcagcctctcaaagtgctgggattacaggcataagccactgcgcctggcctatctccagaactttttaatgaacccaaactgaaactctatatccattaaataatcattctccatccccccttccccagccccagacaaccaccattaatactttctgtctccattactttgactactctaggtatcacatataagtagaattgtataatacttgcccttttatatctggcttctttcacttcacgtaatatcttcaagttaatctatgttgcagcatgtgtcagaatttcctatcattttaaggttgaataatattccattgtacagattgaccacattttgcttattcattcaactatccaggacacgggttatttccgcctttggattttgtgaataatgctgctatgaacatgggcatacaaatacctcttcaaggccctgcttttgatttctttgtgtacacgtccagaagtgaaattggtggatcaaatggtagttctacgcttaattttttgaggaccctccgtactgtttttcacaatgcctgcagcatccttattttaagacaaaatgtgaatggactgtgggctctaagccttgtcaggaaatcgtttctggctagacttacaaaggaaatgcgggaaacgtggtcactcaagcgtggcccccactatgtcctcccaatgccccattccttgcctctcctatgggccatcaaagaaatctgtgggcacctgggcgtgaggctccgctgagatccttatgggtgggactggggtggagcctcctcctcgtgggttggacagtggttagaaagcagtgtctgggactaggtcctgggaaaagtctggcatctggggacaggggaagggttgatgttgacccttgtgagtgagacaggcctctatggacctggaagggccaggaggaagctcagtaggtggagtgagccttcctcctctgggtgggagcagtgggggaaaccagagagctgactttctccaggggctcaggagttcaccttcagccacaggccacagtctctgactttaaaattgaacaacaatgttttgttttcactgaatttctttatactagtgcctcttatttaagaccaatgatactgattattaataagaacaatatacatttttctttcaaaataaatttgttaaaataggtgagtctatttaagaaaaatgcttagtaagtaactgagggacaaaaggatatggcaaacatggggaaggtggtacgatcatctagcctgaagtttgggactgagatattgcatgcttttttcagagtcatgaggttcaaatgacaaaacatatgtgaaagtgtttcatgagctataaagcaccctttgggtgtaacacagcatcattttcatgacagatgctgcaggtggtccagtagagtggtgcaggaaggcaggcaggactggagagtaagggggaggtggggaataaggaggaccagggtaggcaggaggttaatgggtttggtggtgaagggaagacagacctgaatttttttttttttttttttaagaatggggacattgagtgtgatctctcacatggaggggaagcagcagaatctcatctgacagcacacgtgggcagcagcgatggcctggtggggcagtagaggtgggattatgggcaagactgggaagggtgtgctcctttctcagagaccagagctctctggtttggcagtggtagagaggagagaggctagcctgcgaatgggcgtcctcagggaagcaggaagtgagtgggtgtgggcaggtctgcagttcactccggatggaaggaaggctgccgggagtaggaacctagggcagcattcttcacactctatgtgcagagtgtctcctgggcagaggcttcagaatacagattcctgggctctcccctctgcctctacttctgaatgtctaatggcaggcctgggaactgtgtctgtaacatatactcagagaggatgatgctggagaacaattaggagatccaatgaagacaccaaggggagcaaaagagactgtcagcactttggttggagctagagttggtcaaggcattattccatgtatttcacctggttttcactcatttgacagggatctattgtgctttggtgtgtccagtactgtgggaaacacaaataaaggaggtagagcggtggggagagtgagactggtgaaggcccagcagctgttccaggcactgtttctccctggcagaggctggattcatggatgatgctggtactgaggcgtggtttgactttgaggagcatgaatgcctggcctttggtatctagagagatgaaaggtacagtttcagcctggacattcagttttccctgccaaatctaggtagacgatgacttgagttcttaagtacacaaggagcagtccagggtcctgggtgttggatgatttctataatgccagctggcatttttgctccgttagtgtgccacagatgggggagtcactggtgagtgccactgagggcaggccttattctgcttcctttcttgggacaacattgactcctctggtttaagctgacagagatttctcctggtgttggtgctagccatcttccagatgagattaaaacctaaaatgctcatttagtttgtcttaaaagtgtcttacaagcaacttgtctgctgagctctgtgtgctgcaatcatggcaggaaatggaatctcgggtttcaggcaggggcaagtgatacagtttagagttagtgttgaggcttgaagactgtagggttacaacattcagttggatgtgattcagagcaagttcggacagtctttctctcagaaattgacgcaaggctgcactctatttactggaaggcttgcaggcggttgactgctaatgtgctcatatggaatttgggcaacaacacctcttgccctctctagactgtcactaagtacacaatccgatgcttgtcatgctgacttggtttcctctgttctactgaggacttggttgtccttcctcaatctttcccttcatatcacacatggtatgactcttaccaaccttccctttagctataccacatcaactattcaactgcagtagctgttgggcaattggagactgtcttttctttgccttcctgggaagaggccatgatggttccacgccagcagccctgaggtgggaggggcttgttgctttcaccagggaccgtggtaccaccatcaccttggtgggtttgatgcaacatgaggaggtggatgatggaacaggcgc

SEQ ID NO: 202 - DNA, 31737 bp, Homo sapiens
gatcaggctggtcttgaactcctgacctcaagtgatctgcccgcctcagcctcccaaagtgctgggattacaggcctgagccaccatgcccggccacatgcagcctctttaaacttcttcctgtttcagttcaacgccttgtgatctgggcttctttctggcccagtcttcccttgggcaaggggagttcccagactccagaccacccacaccttgaagacacggtcatctcctcctacctcgctgcttgctccatcctggccttctcctcctcccaccccttcaaaggaagacctgtcccccagggaaatgtgttctcccttttcattttccatccctacttcccttcctgccctagatccacacactgccttggcttcacacaggagccatttctgggagacatcagtttacctgggggcactcccccagtgcttgtctgggtagtgagccccttgactcagcagccttgaggtccctcctgcactgccctgcaggatgggtcaggttctctgcagaggatattggtggccttcaaggaccagaggtagttgagaaagcgtaggtctcaccccacccttccccatcgggtggcatattataatgaaatcaactctcagacccaacggctaccctactggaaacatctgttagcacgaagcacagaaacagacaccctgcccctgcccacaagctcagggaagtctcactctgtcctgtcacaacagcttttgtcagggtgaattcaaggacatgctcaccatgactagctaacctccagtcagagcaccacctgcgggggcccagaaccactcagagaaagttctagacccggggcactgccctgctggtggctggacttgcccaggcacaggcagaggggacttgcggtgcctcttcccaggcacacatcttcagcaacactctttttactacagaacaatgatttccgaccctcccgtgttaatgtacagaccctctgctgtgacagtagacaaccacatttgaagtgctggctgtggctgcccctggagtgtagactgctgctcagggtctttcaaaaacaccaactaagtttaactcacacgctcacaaaatcacagcagcactgaggcgattacagccagcatagctgcctgcccgtggcccctgctgggctccgcgctctcgccccacgatggccacctctctgcaaggcacgcaagactcctcaccttctgctttgggggtccctctgacccaagttggcccccaccttgtccagtcaagccactgacccagtgtgttttctggccagtcagatactcccacccttgggtctctgcagccctcgcctctgggcaaaggcctgtgctggggttaccagcagggtcggattccaacctattctggaaggttgaaggggtgggatataaaagaaagtggaggtggaggtagggatgggctgaggggccaaaagatgtactggggaagggggcatttcttggggtcctccaacgtcctggctcacgagcttccccctccaagggagcaacctgaggtgcacagagtggccttgtgacaaggacacagaacccacctccaccttggcttgggactcctgcagcctatgcagccagctcatccgtcacccaccctcttctcctggtatctgccactctggaacttccctctacctctgggctctgccttcagccagggttggggacagcaggtaggcagatcccatcgcagacaggcctgccttcctcagggcctcgcttaaatccacaggaatctgctggggctctgccctctggctggggcaggtggaactggccagattggcggtggggggaccactgtgcttgccatagggactggcccagctgccccacaggggagcacattggagtaacaggggaggctgacccgagcctggcccggctccacactccccacccccaccccaccatcagggactcgcatttaattgtcattcatttcccctctctgaattcaaactaggcacagatcaaatgattccatgatgacaaactgcctgtctcaactgaccagattccactggcaaacactccgctgaccttgggcagctccctctgctcccacctcctctggcccttgtgcttctggggctttgtggagtagctggacatcaatgataacactaacagtagccggcctgccaccaagttctttacataggggatgcctatgtctgtgcttcattggcgtcatctcacaaggccctgagctggcaggaaattgaggtctcaaggggaaaagccacctgcccccagtgacaaccaggaagtgcaagactctgacccaacgcccatgcctgccatccccaaacatgggctcaaaacccccttcccagggacggctgtgtccacccctcagcaggaggaggagaccccacagcaccgggtgagaggtcagtgctgaagccagggaggcagctctcagcagggcacctgtgtggagccagggaagccagggccacacttgcagggtgaagtggggaactcggaaggctgggcagtggagcaaaatgcttggtgccctgcgggaaccggtggccaaggctacactgggatgaagggagccgtggagctgcagaatctgcgggtggccctcagtggcaggcagccaggccaacaggggctttgggctgcaggtcagcccctcccctgctctggaacttttggagggccattacaaaggacatcagccccaagatactcctctgaaattctgcctgaaaggcccttcacattccctaattggcacttacaacattccagaacattctatggtaccttaagtttctcctccccctccaaagggcccttgaaccttaaggatagggcagaaggggctcctcaccctggcctcgagggcttaagatccagctgaggactcctagcctccctgtgtgctgggcaggaaagtagctccatgtcactgctgtccctgggaaaggaaaaaaggttgaggaagggctcagagccagccttcagaccaggcaggaagggttcagagccagccttcaggccatgcaggcctcctggatgtgcttactaactctgggctcgctgttctctgagctggctgggagttcccctctgcacccccgtttcctcccctgtaaggtgggaataatagcgtatgtctctaggattaagtgagccagtcatgcatgggccgagaaccaggtttggcatattgtagctgctcagtggacgttagctgttatgattggaccacaacgtgcttccgtttcaattctgtgggccttttggaggtcctgctggatgctaagcaccgaaacctcaacccggaacaagaccagaacaacctgagcaacaacaggaccagcgatggctctccctgctggaggattctggaagtcacctggctggaccaagccctctccgtgttctctgtcagcccactccccagagccgctaggcctgatgtgcacaagcagactaataaaggcttgaggacaaaaagggttttgagtgataagtgaaaaaagaaaggagatagggctgggccaacaggccttcccttggtggtggggagccctcagaggtgggaggaaccccagaggtgaagagagggacatggtgggggcacaaaaaaagcttccagagccacaggcctgggcgagtcctgacatggagcccagtctcatacggcctctttccctagtggctggctttgctcctggccctaggtagcccaacagctgggcaaggggtccgtctggtcaggggaaaggtgcaggggcagaaggtagcagagggagaaaaggacaccctgtctgcctctggccccaaagacaagtccgaatggggccagagggaaatggctgggccttggggtgccccagggtcttggaggggaccgggtgttcaggtttcgcacaagtacaggagggaccggcgaccgccctccccccgccccgggaggctccgccagggacaggcgtccccgggattggaggtgacccccgtgggttccgaagccccgcctcggccatgcactgtctactaggcgcgcttggggagcctaggggccgtctcggagaaatggggtggtccccgccaggcggcggcggggcgggccctgggcgccgaaggggttaaggcacctgggccaccgcccctgccggcccctcctcccgcggccgggaagaggaaagtcgcggcgggggcgcggcccggtctccgtccccacccgcccgccgtcccgccggcccgagccgtggcgcccagagctgcgagccgctcgcccctccgccgctccggcccgggccgccatgtcgctgtggtgagtggggctgggggccgtcgggggcctgggcgggggcgtgggcccggggctccccctcctccgtggccacagacgggcgccgggactcccgggataggagatgcccccgcgcgcgccgcgccggcctcagtttcccgggggcggatgggcgggcgggcgcggcggcggcggcgggagatgttcgcggtacgcggccccggacccgtgggggacgtcgaggggtctcggggcgccgcgctcagctccccggccccgcggccctggacaccgctccaggaccctggcggctgggaccccaggtcttgccggcagctgggtcccctctcccttccagacccctgagggccccctgcgtccgggccactctcctcctctcggggcttccttccgcgggacctcggaccgccgcccgcccggcccctctccgcccctcccgggctttccctacgaatggagcggacccggcaggtggagcgcccgcagcccagggcctcgccgccttcccggtgcaccccccgacctcccccgtcccggcctcggtgggcggcttccctggaacccctagggctggcagggccggatccggagccctccgtttcctccccggagagctggaccttgggtcacaccccccagcctgcacctaaggtgcccctgtcttcctccaaccacatgccccagcaacctggggaccctatggggaaaatgtcgctctatggggctcagcctgcattcaccctggggcctggacctgcaaccggaccagccctcagggcaacccaggcgtctccacgggctgcctgtctctcctggcaccctgctcctcccccttggaggtcagcgccatctctctgctaggctggccctggaaggccactctgctgtccccagagctctcagcccccaggtctccactggggagggtggggcaggtgtcctggcagcccccggagggtgagatgaagagaggaggtccttcaggacaggggctcaggccccagggcttgggacgaccagcactcctggcagagagctctaatttctgcttccgaaatgggtgtggaccggggttggggtgggggggtctctgggcaagaagggtccctcaagggctggagctgcaaatgtgccccctcccagggagtagagctgtagcctcatgtcttctaatggggtgttatgagctggggatgttaaggtaggggtgaggggcagtgccatgctagaggtgctcactgcatccttgggcctccatcaaccatgagggctgctctttgttgggtgagacagactggagaagggggaggagggccagtcttcctcaggtcccaagctcgagccactctccaatgtgccccacatgtgatggagctcccgggcggcacagaggatcagagggtgccctctcaatgactctggctctgagtcacctaatgataccgatacctactgctgtgggtaggtacaccgcagggaaatgaaaggcattggggttccaggcgtggggaacagggcagaggtttccacctgaggccctcctgttaaggtgacagcattcccctaactgtgcacccgctgcctggtactttatatagcactccaatcctgtgttttagccccatttgggggaagaagaaatcgtggctcagagtggttgtaaaccactcattcagcttgtaagcgtcagggcctgattccacagtgctccttgaggagagggcagggtgggagaaagaaagggcagggtgggagaggaagcgggaccctaccctgacagcttagggactccgggactgagcctgtgcccaggtccacttgcccgtctgggaccacccagcctcccaaggggggcgccaggagagccctgggctcatcttttctctctcctctgtactgtccgctctcccccacaggaagaaaaccgtctaccggagtctgtgcctggccctggccctgctcgtggccgtgacggtgttccaacgcagtctcacccctggtcagtttctgcaggagcctccgccacccaccctggagccacagaaggcccagaagccaaatggacagctggtgaaccccaacaacttctggaagaacccgaaagatgtggctgcgcccacgcccatggcctctcaggggccccaggcctgggacgtgaccaccactaactgctcagccaatatcaacttgacccaccagccctggttccaggtcctggagccgcagttccggcagtttctcttctaccgccactgccgctacttccccatgctgctgaaccacccggagaagtgcaggggcgatgtctacctgctggtggttgtcaagtcggtcatcacgcagcacgaccgccgcgaggccatccgccagacctggggccgcgagcggcagtccgcgggtgggggccgaggcgccgtgcgcaccctcttcctgctgggcacggcctccaagcaggaggagcgcacgcactaccagcagctgctggcctacgaagaccgcctctacggcgacatcctgcagtggggctttctcgacaccttcttcaacctgaccctcaaggagatccacttcctcaagtggctggacatctactgcccccacgtccccttcattttcaaaggcgacgatgacgtcttcgtcaaccccaccaacctgctagaatttctggctgaccggcagccacaggaaaacctgttcgtgggcgatgtcctgcagcacgctcggcccattcgcaggaaagacaacaaatactacatcccgggggccctgtacggcaaggccagctatccgccgtatgcaggcggcggtggcttcctcatggccggcagcctggcccggcgcctgcaccatgcctgcgacaccctggagctctacccgatcgacgacgtctttctgggcatgtgcctggaggtgctgggcgtgcagcccacggcccacgagggcttcaagactttcggcatctcccggaaccgcaacagccgcatgaacaaggagccgtgctttttccgcgccatgctcgtggtgcacaagctgctgccccctgagctgctcgccatgtgggggctggtgcacagcaatctcacctgctcccgcaagctccaggtgctctgaccccagccgggctactaggacaggccagggcacttgctcctgagcccccatggtattggggctggagccacagtgcccaggcctagcctttggtccccaaggggaggtggagggttgaggcctacgtgccactgggtgtggtggggtgcaggtagccagaaagggacctccctgtgtggataattctaggaaactgaggcccaggaacggttggagctgcccagtctggaggccctctctgaggagcgaggcgccaggccctggcagccctcctgacctgggtccgttgctggccccctcagatgtggtgggaggtcctggtgacctctggaggaacgctgtgctcaggtacctgggctaggcctggcctgatgggtctgtggccgcccctcgtcttcacagggaagagtcttctgtgaaatgcctcagtctccccagaggccgggcggccctggcaggagaaactcaaccctgtgcgggctcacaggcaccccccagtccacaccctggtctcctgggagagagggcccagccggctctccgcagccccaggcctgcctggagacgggccgcctctgccacagggcctccactcctggctgtgtcctgtaaggtctggaagggcgaccgctctgactacctcagcgcccctcagaatctccctggggctgcagccctaccccaccccgacacagggcagaagagcagcgctcctggccccccgaagtcccagagctgctgacccccaccccaggcaagtctctcccgcagcccccacacccccaggcctggctccctggctggaaagcagccggtttggccctggaagtggacattcctctattactgtgaagttttatttatgaagaatttggagggagaaggctccaggcttcaggagggggtggtgtcctccctggccctcctcccttccctcccctcattccagctgcctgccctcagcacccccaggcccctcacagcccagccccctccagagccctgccccaccgcaccctgcttctccagggcctagcagaccagcatctgccccggtgaagggatggatcagctgtgggggtgggtgcagaaggttgccacctcctacctcagcgggagtcacctaggaaagatggagggattgacactattttctcaataaaatgggacttttttttttttttttttttttttttggtgtgaaacttcctgttcccagctgcatcagagagcctgtctggggccaaggttgccagagatttctgaagacacagcttgttccttgttcttggctggtgggtgcacaaggacttctggaagggatttagacggggctgagtgctaggattaaagtggggatgggagtacggcaacagaaaaacctgggagctagcaatgcacccagcccttgactgtgccctggtggacagccgagctgtggctctagcgtgagccagtgccttcctgtccctgccaagggtgaggccagagttggccccgaggctaatgtttcagtgggtgagattaggtcggccgtacagaggccggtgggctccctgacatcccttccaggcaacctgaaagcactgaaatagcttatggccctgtgccagggaccttggcccaagctgctgacctccagggtggggagggagctacccccaggagaagagtcactcagacagcagtatgagcaagccagccagcagctccgtgcctgcacccagctcaggggaatcccagggggttcagatgcccaggaaggaaaaggggacagcgctactgctatggaatgagaccaccacttctcctgttgtccttcccagcttctccccaacctccccttttccctagtttataagacaggagaaaagggagaaagcaaaaagctggaaagaaacagaagtaagataaatagctagacgaccttggcgccaccacctggccctggtggttaaaatgataataatattaacccctgaccaaaacgactggtgttatctgtaaatcccagacattgtgtgagaaagcaccgtaaaactttttgtcctattagctgatgtgtgtagcccccagtcacgttcctcacgcttacttgatctattatgaccctttcacgtggaccccttagagttgtaagctcttaaaagggctaggaatttctttttcggggagctcggctcttaagacgcgagtctgccgacgctcccggccgaataaaaacctcttccttctttaatccggtgtctgaggagttttgtctgggactcatcctgctacatttcttggttccctgaccgggaagcgaggtaattgacggacggtcgaggcggccccttaggcggcttaggcctgccctgtggagcatccctgcgggggactgtggccagcttgagctacgcagatcctgagagcactcccgggtaggcaatgctcttgacgggtggaacacctcgtcagagcagtgtgtggcaggcccccgtggaggatcagcacagtggctgaaggaacgggcacttggagcccggacatctgaaacttggtaagactggtctttggaacttgcccactccatttgagtggaagcatgtcctgatcacccacggtgtgcctgtaccggcactttggtttttgtttttgacttgacttgaattgcttgatactttggttttggttttgacctggcttggatttctggatactctgggtttggttttgattctggtttggtgtaaactgaaaaagtgtgtgtgtgccctttttacccattctttgttctgtggtgtgcgtgcggtgtgagcttggtgttttgtctcaaggaaacacgggtcagacacaaggtaagcctactccgctaggaactatgttgaaaaattttaagaagggatttaacggagactatggggttactatgacaccagggaaacagaattttgtgtgaaatagatcggccaacattagaagtgggttggccatcagaaggaagcctggacaggtcccttatttctaaggtatggcacaaggtaactggtaagtcaggacactcagaccagttcccatacatagacacttggttactacagctggtgcaagaccccccacagtggctaagagggcaggcagcagcagtgctagtagcaaagggacagatagccaaggaaggatcccgctctacccactgggggaaatcaactcctgaagttctgttcgacccaacatcagaagatccattgcaggagatggcaccagtgatcccagtgctgccctccccttaccaggcagagaggctccctacttttgagcccacagtgcttgtgcctccgtaagacaaacatatccctaggccacccagagtagacaagagaggaggtgaagcctcaggagaaacccctcccttggcagcttgtttaagacccaaaactgggatacaaatgcccctgagagagcagcggtatactgggatagaggaggatggtcacatggtggagaagcgtgtttttgtgtaccagcccttcacctctgccaaccttctcaattggaaaaacaataccctgtcctatactgaaaaaccacaagctctaattgatttgctccaaactattatccagacccataactccacttgagctgattgccaccagttgctcatgttcctctttaacacagatgaaaggcagagagtgctccaagcagcaactaagtgggtacaggaacatgcaccggctgattaccaaaacccccaagagtgtgtaaggacccagttaccaggaactgacccccagtgggatccaaatgaaagagaggatatgcaaaggctaaaccgagacagggaagctgtcttggaaggattaaagaggggagcccagaaggccacaaacgttaacaaggtctctgaggtcattcggggaaaaagaagaaagtccagcacaattctaccagagactgtgtgagggctatcgtatgtatactccctttgatcccgttagccctgaaaatcagcgaatggttaacatggctttagttagtcaaagcgcagaagacattagaagaaaactgcagaaacaggatgggtttgcagggacgaacacatcacagttattagaagtagctaaccaggtgtttgtaaacagggatgcagtaagccctaaggaaaaccgcagagagaatgaacgtcaggcccggcgaaacgccgagctgttagctgcagcagtcggaggggtctcctcaaagaggcaagggaaggggggacccgggaaagagactcagcctggctgtcagagcttgcagtgtaaccagtgtgcttattgtaaagaaataggatattggaagaacaaatgcccccagctaaaaggaaaacaaggtgacttggagcaggaggttccagacaaggaggaaggggccctgctcaacctggcagaagagttattggactgagggggaccgggctcaagggcccccaaagagcctatggccaggatgacagtcgggggtaaagacattgattttcttgtagatactggtgctgaacattcagtagtaaccgccccggtcgcccccttctccaaaaagactattgacataatcagagccatgggaatttcagcaaaacaagctttctgcttgccccggacttgtactgtaggaggacgtaaagtgattcatcagtttttatatatgcctgactgtcccttgcccttgttgggaagggacttgctttgcaagctgagagccactatctcttttacagagcatggctctttgctgctaaagttacctggaacgggagtcattatgacccttacggtcccctgagaggaggaatggagacttttcttaactgagtcaggccaagagataagaccagctctggctaagcggtggccaagagtgtgggcggaagacaaccctccagggttggcagtcaaccaagcccccatacttatagaagttaagcctggggcccagccagttaggcaaaaacagtacccggtccccagagaagctcttgaaggtattcaggtccctctcaagtgcctaagaacctttggaatgatagttccttgtcagtctccatggaacactcccctcctgcctgttcccgagcctaagaccaaggactactggccgggacaggatttgcgcttggttaagcaggctacagtgactttacatccagcagtacctaacccgtacacattgctggggttgctgccagctgaggacagctgcttcacctgcttggacctgaaagatgctttctttagcatcagattcgcccctgagagccagaagctgtttgcctttcagtgggaagatccggagtcaggtgtcactactcagtacacttggacctggcttcctcaagggttcaagaactcccccaccatcttcggggaggagttggctcgagacctccagaagtgtcccaccagaaacctaggctgcgtgttgctccagtacgttgatgaccttttgctgggacaccccacggcagtcgggtgcgccaagggaacggatgctctactccggcatctggaggactgtgggtataaggtgtccaagaaaaaagctcagatctgccgaccgcaggtacgttacttgggatttactatccgacagggggagcgcagcctgggatcagaaagaaagcaggtcatttgcactctaccggagcctaagagcagaaagcaggtgagaaaattcttaggagctgcggggttttgcagactgtggatcccaaactttgcagtattagccaagcctttgtatgaggtcacaaagtagggggaccgggaacctttcgaatggggatcccaacaacagcaagcctttcgtgagttaaaggaaaaacttatgtcagccccagccctggggctacccaatctgacaaagccttttacattgtatgtgtcagagagagaaaagatggcagttagagttttaacccaaactgtggggccctggccgaggccagtggcctacctctctaaacaactagatggggtttctaaaggatggcccccatgtttgagggccttggcagcaactgccctgctagtacaagaagcagttaagctgactcttgggcaaaacctgaacataaaggccccccatgctatggtgactttaataaatactaaaggacatcattggctaacaaatgctagactcaccaagtaccaaagtttgctctgtgaaaatccccgtataaccattgaaatttgtaacaccctgaaccccactaccttgcttctggtatcagagggccctgtcgagcatgactgtgtagaagtgttggactcagtctactctagcagacctgacctccaggaccagccttgggcaccagtagactgggaactatacatggatgggggcagcttcatcaacccacaaggagagagaggtgcagggtatgcagtggtaaccctggacactgttgttgaagccaggtcgttgccccaggccacttcacccagaaagctgaactcattgctttcattcgggccttagaactcagtgaaggtgagactgtaaacatttacactgactctcggtatccctttttaacccttcaagtgcatgaagcatcatataaagaaaagggcctattgaactctgggggaaaggacataaaatatcaacaagaaatcttgcaattattagaagccgtatggaaaccccacaaggtggcagttatgcattgcagaggacaccagcgagcttccaccttggtgggcttggggaattcccgtgctgactcagagttccggaaaggtagagcagatgaattggactatcaaaaatagttaagggaaagtatgtcaggaaacaggattaaaatggatacaggctctccctatggtattatttaaaattagatgtaccccttctaaaagaacaggatattccccttatgaaatattataggccccctcccatattgcggggacttccaggcactccccgagagttaggtgaaattgagttacagcgacagctacaggctttaggaaaaattacacaaacaatctcagcctgggtaaatgagagatgccctgttagcttattctccccagttcaccctttctccccaaggactggaacgtagcctctttgtgcccacggtggaaaggaccccagactgtcatcctgaccactcccaccgctgtgaaggtagaaggagtcccagcctggatccaccacagccgtgtaaaacctgcagtgcctgaaacctcagaggtaagaccaagcccagaggacccttgcagagtgaccctgaagaaaacgacaagccctgctccagtcacgcccggaagctgactggtccacgcacggccaaagcatgaggaagctcatcgtgggattcatttttcttacattttggacttacacagtaagggcttcaactgaccttactcaaagtggggactgttcccagtgtattcaccaggtcactgacgtaggacagcaaattaaaacaatctttctgttctatagttattatgaatgtatgggcacgttaaaagaaacttgattgtataatgcaactcagtacaaggtatgtagcccgggaaatgaccaacctgatgtgtgttataacccatctgagccccctgtaaccactgtttttgacagaagattaagaactggccttttcccaggtgatacaagtaaaataataactagaacagaagaaaaaggaatccccaaacaagtaactttaagatttgatgcttatgcagccattaatagtaacaagctaggaacaggatgtggttctcttaactgggaaaggagctacagagtagaaaataaatatgtttgtcatgagtcaggggtttgtgaaaattgtgccttttggccatgtgttatttgggctacttggaaaaagaacaaaaaggacctggttcatcttcagaagggggacgccaacccctcctgtgctgccggtcactgtaacccactagaactaataattaccaatcccctagatccccgttggaaaaagggagaacgtgtaaccctggggatcgatgggacagggataaacccccaagttgccattttagttagaggggaggtccacaagcactctcccaaaccagtgtttcaaaccttttatgaggagctgaatctgccagcaccagaacttccgaaaaagacaaaaaatttgtttctccaattagcagaaaatgtagctctttcccttaatgttacttcctgttatgtatgcaggggaaccactatcggagaccgatggccttgggaagcccgagagttggtgcctactgatccagctcctgatataattccagttcagaaggcccaagctagcaacttctgggtcctaaaatcctaattattggacaatactgtatagctagagaagggaaagactttatcgtccctgtagaaaagcttaattgtataggacagaagttgtacaacagcacaacaaagacaattacttggtggggcctaaaccacactgaaaagaacccatttagtaaattttctaaattaaaaactgcctgggctcatccagaatctcatcaggactggacggctcccaccggactataccggatatgtgggcacacagcctacattcagttacctaataaatgggcaggcagttgtgttattggcactattaagctgtcctttttcttattacccataaaaacgggtgagctcctaggtttccgtgtctatacctcccgagaaaagagaggcatagttataggaaactggaaagataatgagtggccccctgaaaggatcatacaatattatgggcctgccacatgggtacaagacggctcatggggataccaaacccccatctacatgctcaatcagatcatacggttgcagaccgtcttagaaataattactaatgaaactggcagagctttgactgttttagctcggcaggaaacccaaatgaggaatgctatctatcagaatagactggccttggactacttgctggcagctgaaggaggagtttgtggaaaatttaacttaaccaattgctgcctacaaatagatgatcaaggacaggtgattgaaaacatagtcagggacatgacaaagttggcacacacgcctatacaggtttggcacaagtttgatcctgagtctttatttggaaaatggtttccagctataggaggatttaaaaccctcattgtaggtgtattgctagtaataagaacttgcttgctgctcccctgtgtattacccttgctttttcaaatgataaaaggtattgttgctactttggttcatcagaaaacttcagcacacgtgaattatatgaatcactatcgctctatctcgcaaagagactcaaaaagtgaggatgagagtgagaactcccactaaaaagtgaaaattctcaaaggggggaaatagggaatgagaccaccacttctcctgttgtccttcccagcttctccccaacctccccttttccctagtttataagacgggagaaaagggagaaagcaaaaagctggaaagaaacagaagtaagataaatagctagacgaccttggcgccaccacctggccctggtggttagaatgataataataatattaacccctgaccaaaacgactggtgttatccgtaaattccagacattgtgtgagaaagcaccgtaaaactttttgtcctgttagctgatgtgtgtagcccccagtcacgttcctcacgcttacttgatctattatgaccctttcacgtggaccccttagagttgtaagctcttaaaagggctaggagtttctttctcggggagctcggctcttaagacgcgagtctgctgacgctcccggccgaataaaaacctcttccttctttaatctggtgtctgaggagttttgtctgcgactcatcctgctacactgctatttctccctcctcagcacaggtcttcccacagttctctcttggccagccggctgcataatttgcagagcccagtgcaaaatgaaattacaggaccctggttttaaaaaggtattaagaattttaaaggtcaggctcacgcctgtaatcccaacactttgggaggctgaggtgggaggatggcttgagcccaggaatttgggaccagcctgggcaacatagagagacccctgtctctacaaaaaaaaaaattttttttttttgagacagaggtctcattctgtcgcccaggctggagtgcagtggtgcgatctcagctcactgcaagctctgcttcccaggttcgcgccattctgctgcctcagcctcccgagtagctgggactacaggcacccaccaccacgcctggctaatttttttcttaaaaaattttaaaattacctcagagtggtggcacgcacctgtctggggccaaggttgccagagattgcctcgggatgctgaggtgggaggatcccttgagcccaggaggtcgaggctgcagtgagctgtgatcgcatcactgcactccagcctgggtgacagagcgagacactgtctcaaaaaaaaaaaaaaaaaaaaaaagaatttaagattgccacagcagagcattgagcattaaaccaagtgctgggagcttctgagggaggcctgcgactgtgatgccagccctatttgcccctcctcatcctcagaagccaggtcctgctctgggctgcagagaggggattggggctcacagttcagcatgggagagggcagcccagggacacccagaaaatggaggtgtacaggccacaggacccaggcccaggtggaggcccagagacggttatgggttcagctgcccctgaaggatgaggcagagggaaccacatataccaagggctgctgggagcagggtggatgcattctgaagcggaaaggagctcctctcggggctggacctggggtgagagaaggggtgggaggctgggaggcaggcagggcagtttctcaggtcttctaggttcaggagtactttaactttatcctgagcacaaagggacaaagagcaggggttcacggcagcctgagggagcagagggcagttttgaggcacctccacccctccctctggcgcactttggcccattctggccagctccagtggggccccactctggaaaatcaggcatttagttttgcttcctggtaatgataacaactgacattttatggagcacatttcatatgccaggcaccctggtaaacatttaacgtgtagtcaatatgactttaactcagggtacaaatatggttactttttaatttttctcattgattgctcaaatccctcatgtaccattattggcagaaaaatccaatatcagcctcttggaacccactctcaaattgtccaagaacctcagggatttccctcctccaaagagagggttctctggaaagtctgagcagtcatctccagttgttccctctctctccacacaggggcgctgtggaacagcgggcctgcacagtcctgtggcttctgaggcttggctaccttcactgcacaggctgcggtggggcctatgcttccaaaacaaagttacccttctctcagtcaccctcacaagctcaacgacctttccccagagagcagcagcatgccaggggtgctgggtcctgtggccccccagtcagctacacagtctgtgggggaatcccacagactcaggttctctctggcctggtgaagcaactttttagacagtagattttagttggtcccagggtcttaactctttcctcctcaaaggccctggctttgcaaaatggttccctcctccccggcaactggctgtgcattccaaggggccttgaaaaggggtagcctttgtcagtcctcaaaaagtccagttccactcttcccccagggtaatgggtgcctactcagccacatttacataactaaaggagaccactcaaagaatcctactcttaacaaagaaagctgttcctaggtgacttattctgtgcacctaaactgagaaggagcagggggaagcttctggaatcctgttatacaccatgttcaaagtaagaaatggagggctctaagagaaggatcccacggctattgtgtgacaggcacgatttgaactctgtgccctgcacacctaacccccatactctactgtctcccaagagcctccagcctcccatcctttttccttagcagtaacttagtcacaaatatctgtgtttgttgtttctgtctaaaaggaggaaaatgttatgtccaatgagcgattgaaactgtgatggttgggggagcccagcgttattagggctgtaagaaataaatgtttccagagagttatttaagctattgtgaagaaaaacttttctgttccagtgaaacactatacattatctaaagcacagccagacctgtctgcttccagccccattcacggtctttgagctattttgcacctctttttaagttgcaagtactgagggctttgcaaactgtcttgtcaggtgaagcttccattgacttctcttccaccccccaccaacacccccacggtggaaaaaccagtttgccgctgtttgcaattcaattccttcactccatataaatttgtgctttttgatgtctcctttgaaccagatataacatctaccttgtcctttttatgagtaaaataaatctttaatacatgctcattttttatttctgaacaagggtcatgaatctacctttttctgaaaattgtcttttaccaattgcctttatgtgaaaatgaacacagatacattatcgaacagaatgcaatttttgcttatatttctaaaacaaaacttgaatcttggaatacattgtatactcactgaagacccttccaaagtgagccaaagcttagagctcaatccttttagagggttttgccccccgggaatttgagaaaatatctagtccagatcgcaaccagacagaatgaatccgaatgagtgagtgggtggggcgcgagcccaggcattttttatcgctcccaggtgactcaagttgggaactaccggcctgggctgggattgactgaccctgccgtgcagcctgtgacctatcacaaatcaccttggctttgtttttcctcggtgcggccgaatcccacaggaatgcgtggaatccctgccctcacccatggcgaagctgcccccctcgggctccgcctgccccccgcggctcctcgtcgccgggcagccaggagctgctgggtgggcgcgggcgtcccggggcgcggtgcgacccagagcccctcgcggaacccgcctgggctgtgcaggggacaacgcgttcggctgtcgagggtgggggagccctgtgtgtgtggtgggggtggcatccgatggatcccgggggcctgcggaggaggtgggcatctcggcgccacccggtgcgcgccccgagcgagggcatctcccctcgagaccagcccgcggagctgcgcgaggcgtggggtaaggcggcgtagacctcccagtgccggctgcagggccgcgggtcggggcggggccccgcgaggagcaaggggctggccgggctggagggctgggtgagtccccgccctggcaatcccagaagagggcagggagcgcccccaactgaccgccgggggcatcgtgacgctgaggtggatgggagactgcacgatttgagcaggttgtgtgaaatctggaactccattacttgtaccccaaggcatcttttttatgcggatttaagctggaaagcgccacaccaagctgttaacaggaactgcttcctggcactgagattccaggggctgctcgttcctttctctggctcatctgtgtaaggaagactttcctccgtgagcctttccaccaagctcaggcctgaggcttaggagaaatgtgcgagatcccgacagcctcggagggagtgagggggcttcgagaccctcagggccaccttaggggcctctaccagggaaggagaaatgatcttgtttcaccggccagggaggtgagtgcagccccttcaggacctcaaaaatccctactgggggcccaccctcagaggcctggtgaggtcagaactaaggccttggatagcaggatacagtttgctgttctaattgtttagtatctgatctcatagacaaatgacacaataatcattttttcataaaatcttaatatataaagccaacgatggtaaggatatgtttggtttcaagtgacatgagattctgctcagttgggcttggtggctcgcacctgtaaccccagcactttaagaggcctagatgggcagatcgcttgagctcaggagtttgagaccagcctggcaacatggtgaaacaccacctctacaaaaaagtacaaaaatcagccaggcatggtggcatgagcacctgtagtcccagccactgagggttgcggaggggagctgagatgggaggatcctgggaggttgaggttacagtgcccatgcactccagcctgggtgacagaatgagaccctgtctcaaaaaaaataataataataaaaagaaggaaagaaaaggaaaaaagaaagtctgctcgaactggttgcgaccagcaaggagatgtgtgggctcacagaagtgaaagtacagggatgcctgcctcaggggctgatgcaggacagaaatataaaacagccactccccatactggagctgcctagctggaaaggggcaggttgagattgctctcaggtggcctgactgcaaaagctgcatgttagccaccactcagacacgtgctagggtctggaggatggaggcaagtctggaaacagctgcctgtccaccatgactgcctgcaatttgttaagaccacctgcaatttgctaagcgctgatggggaggccaggctcagctcagatagctcagctcccgcagacctagtcgaatgtttcttgctagattttatgtatttttgtaaccaaatgctcccattttttctaagaaaaacggaatgaattactttttttttaattattattttctattctctcccctttccctccttcccgtttcctactcagcccttcagaaatgcaaatgtaaccgttcacctccccctagacattcccttcagggtaattcccttcagggcaatttcttcaacggctccaagacagatcttttccttgagagctgacagtcgatttgctgacagttgatttccagactgaagcgtacctgccacggaacttttacctccatggggtgaccttagaacttctgctctgcaaactggaagtgaccttcatcctccaggagggtatgtcgaaagcattcccgcttggccacttttacaagttatttctgcctgggaaggcaccaactcaattatccagtagataagatacggggcaacaggggaacgcctgccttgcatacttgctcacccccgaccttataaaagtgtccatgttactgctccaaaggtgaagcagcacatgtaaaggcaggacgcgttgtgtcccttccccaagctacctttggaatacattcacttttcttacaccagacctcgcgcttgttcattggactctgcatgcgatgagcaactaacctgcttttcagttatgctttggagccatgttgtttagcacttagaaaatagaggtgggtctgggcgcggtggctcatgcctataatcgcagcattttgggaggccgaggtgggtggaccacttgaggtcaggaattcaagaccaacctggccaacttggtgaaaccctgtctctactaaaaatagaaaaaatgagcccagcatggtggcacatccctgtaatcccagttactcgggaggctgaggcatgagaattgcttgaatccgggaggtagaggttgcagtgagccggcatcacgccactgcactccagcctgggccacagagtgagactccatctcaaaaacaaaaaaaaaaaaaaaaaaagaaaaagaaaatagagggtgtctgataaaaatgtaccttctctagtgtgcagcacagtaaatccagcaccccagagatgtcctgcctggctccctggaacccgtctgtgcacatgatgagatgtcacctctgtaattagcttaggttacatggcacaattagccttaaaatagggaaatattctgggtgagcctcatctaatcccatgagaccttaaaagcagagagctttctcccactggtggcagaaggagaagtcagactagaagcagaattcacatgccattgttgacctgaagactgagggacaaggtggcaaggaatgatagcaaattctagaagctaacagcagcccctggctggcagccagcaaggaaatgggaacttcatactgaattctgccagtaatagaaatgagcttggaagaggaccctaaattccaggggagggatgcagctggacagagaacctagccatgctgtactggtctcctgacctgtgggactgtggcaaaataaatggatgttgtgttaaaaagaaaaaacctaaacactcagaaaaaaagaaaaatgttggcagtacaaagagatattgccagaaacacaaatatagtgagtctttaacatactatttaacaacctagaagagatttaacttaccaaaatcagagacatcaggccagacagggtggctcacgcctgtaatcccagcactttgggaagccaagtgggtggatcacttaaggccaggagttcaagacaaacctgaccaacgtggtgaaaccccatctctactgaaaatacaaaagttatccgggtgtggtggcatgcacctgtaatcccagctccttgggaggctaaggcagaagaatctcttgaacccgggaggcagaggttgcagtgagcctagattccaccactgcactccagcctggcctggacaacagagcaagactctctcaaaaaaaataaaaatgaaaataaaccaaagacatcaaagacccaaacaataccatgagtagtttgaatcaaagatctgtatcaaattctgtaccacacacagcttgtatcttctttttgcatatgaaacctttaccatgtatgtgtattagaaggaaagacaacatcaactatcccccaaggcagaaattaaacaggccaaactctatgtccacaatatacggtaaatcagaaattacccacaaaattaaaccaaacaagaacaatgacaaaaatcctagcctgtttcttaaataactgttgagtcaaagagaaagtaaaaactataatggttcattgttttgaaatcgggaagaccacataattatatttaagggaataatgtcagtttacctcattttgacttcaaggggtgttacgtgtcaggccttgggcttaaggctgtagctgctgaacattgcccaatttaacaactataaatgcattcattattgtaaaaataaaaataaaaacaagtgaactaatgtttcaactcaacattgcacgagaagaattttatttttatttatttatttttttgaaacagggtctcactccattgcccaggctggagtgcagtggcaccatcttggctcactgcaacctctgccttccaggctgaagagctcctcccacctcagcctccccagtggctgggactataggcacgccctccaggcctagctaatttttatattttcggtagagatagggttttgcgatgttgcccaggctggtctcagtctcctgagctcaattcatctgtccacctcagcctcccaaagtgctgagactacaggcacgagccagcacgctgggccagaaaagaactttatttatttatttttttttgagacggagtcttgctctgtcacccaagctggagtgcagtggtgtgatcttggctcactgcaacgtcctccgcctcctgggttcaagtgattcccctgtctcagcctcctgagtagctgggattacaggcacctgccaccacacccagctaatttttgtatttttagtagagacagggtttcgccatgttggccgggctggtcttgaactcctgacctcaggtgatctgcccgcctcggactcccaaagtgctgggattacaggtgtgagccaccacgaccagcccagaaaagaactttaaagcagagtaaaacaaaaccagaaaaaagaaataataaagacataagagagatgagtcaaatttaatgaatttgaaaggagtagataaattgtcggttatttttttaaaaaagcattaaaatagctaaacctatgccaaatttaatgaaagacaagtgtaattagcaagttaattaaatgcagtttaaagtgtaaaagtataagaattataattcatatatgaatagatttttaattttttattcttaaaattaattttttttttttacagagtcctgctctgtcgaaccaggctggagggcagtggagcgatcatagcacactgtagccttgacctcctgggctcaagcgatcctcttgcctcagcctcctgggtagctaggactacaggcatgtggtaccacaccctgccatgagtagattttaaatcttgttgaaaagtatgtggcctgagcaacatggaaaaaccccatctctactaaaaatacaaatattggccaggcattgtagcatgcacctgtagtctcagctacctgggaggctgaggcaggagaattgcttaaacccgggaggcagaggttgcagtgagccgagattgtgccactgtactccagccttggtgacatagtgagattctgtctcaaaaaaaaaagaaaagtatggttcaaataaacaaaaggaatagagtcaaaaagaaaggaagccaggtgtggcacacacctgtactcccatctattagggaggctaaggtaggaggctcacttgagcccaggaattcaaagctgcagtgagctgtgaccatcgcactgcactccagcctgtgcgacagagccagaccctgtctctaaaaataaagaaaacccatatgctctcataatccaggaacaattggaaagagttatcagtcaccttcccagagtctctggagaccatttgggcagtaagttctttcaggcagtaaggtctttcaaactcccaagaaacaactagttctagcctatgagcccatttttgccatggcaaaaaatgacaagctctccaattcattgtatgaaattaatataacactgatcccaaagccagcaaatagagcacagttaaattacccctgaatcccacaaactgcattgtagccagaagccgccttgctatcctggtctcatagctttcaggtatttggctcctcatttgttcctaaatcctactgacagggacatgaggcgggaaaaaaaaaaaaaaaaagaatctgccaaagatggccggacttcaggggaagattacctaccccacatcccccttaacagctccccttcccactgaaagccttttttttttttttttttttttttttgagaaggagtttcactctgtcgcccaggctggagtgcagtgacacatgccctccaggcccagctaatttttgtattttcggctcactgcaacctctgcctcccaggttcaagcaattctcctgcctcagcctcccgagtagcggggactacaggcacgcgccaccacacccagctaatttttgtatttttagtggagatggggtttcaccatgttggccaggatggtctccatctcttgacctcgtgatccgcccgcctcagcctcccaacgtgctgggattacaggtgtgagccacggtgcccaaaccgagccattttcattggcaataaaatctcccacatttactatccttcaattcgttcgtgtgacctcatttttcctggatgccggacaagagcttaggagccacaagtgtggatacgaaaggctgtcacactggcccttcgccctcgctagcagagggcagccatgggcccactgagagctgttaacacttaagccgtccgtggacagcagagctaaaagagcactctaacatggcctccggggccccgggagtcgcaggcaccctgcctggacgctgttgtggggcctgaacgaagttcactgctgccggcgcccaaaagcgctcgctccagctcctgcacctgctcaactgtgtgctccctttcacgagggtcggaatgcggtggatctgagagagtggagtctgatcccgcccgcactgaaacagctggctggttccagcactcctgcgctccagttcccgcctcgtttgctgtgtgctccctcccaccagcagttgagagcagtgggctaagtaaactaggcacccctgtccaaagtcctgagaagggctcaaggaactatcctgcttcactattgatcagtggtctccctgtcaggggcagatccggccttctcttctcaaattatcctgggtgataatacccattgggtttgtctcctgggtgattccctccacggctgaacctcacccactaccttctcgtcagtgtcattgactctgcacacaggttactgttgctcacccaccactggtgcctctgacccttctaggaccatctaggttccccctgagtaactcaggggcattgctgaccagctgtggaccagaaggctcccttagggcacgtgctgcatggtagggctaactgtggctgtcccccaagacctgtggggtcaggcccttccctctgatgttggggttggggaccttgcagcggagtcagagggagaagcttcgtgttccctccaccccaggatcctccaccgaagtaagtaatttgacacagaggaaaccagatgcacaaaaattaaaaggataaaccgtaattcagctaaaatacccaagggttgaaattgccaaaggacgtgcaaaattcaaggaaaaaaagatacgaaagtgggccgggcgcggtggctcacacctgtaatcccagcactttgggaggccgaggcgggtggatcacgaggtcaggagatcgagaccatcctggctaacatggtgaaaccacgtctctactaaaaaaaatacaaaaaaaaattagctgggcgcggtccgggcgcctgtagtcccagctactcgggagactgaggcaggagaatggcgtgaacccgggatgcggagcttgcagtgagccgagatcgcgccagtgcactccagcctgggcgacagagagagactctgtctcaaaaaaaaaaaaaaaaaaaaagatacagaagtgaaataataaaggtaaaggaatgagatagccaggaaaagataagccaacttaaacagaaaagctaggaggagccaggtaactcagaatggtaggtgtgctagattgaacaatgtgtgtctaaagtcacacacaaacaaaacaatttcgacctatgtgttttaaaattaaaaaacaagaagtagctgggcacaatggctcacacctgtaatcccaacactttgggaggcccaggtgggaggattgtttgaacctgggagttcaagaccagcctgggagacccatctctacaaaaaatttaaaagatgagccctgcgtggtggtgcacacctgtggttccagctatcagggaagctgaggcaggaggatcgcttgagcccaggaagtcgaggctgtagtgagccatgtttgcaccactacactccagcctggatgacagagcaagaccctgtctcaaaaaggaaaaaagagaaaccaaaaggacctccataaaacaagaagtagcaggcagttgggtgcagtggctcaccctgtaatcccagcactttgggaagctcccttgagcccaggagttccagacaagcctgggcaacatcgtgagactccatctctacaaaaaattcaaaaatcagccaacgcggtggtgcacccttgtagccctagctactcagcaggttgaggcagaaggatcgcttgagcccaggagttcaaggttacagtgagctatgatcgtgccactacactccagcctgagcaatagagcaagaccttgtctcaaaaaaaaaaaaaaaaaaaaaaagtagcagacaaagagcatgagctcataaagggtcatctggactgaaatctgggggtgaaggagagggcagggccccagcaccccagcagcctggacacactcctgcgccaggtgcagcccccttttcaggggatgaatgggggacttgtcttcctctgcattccttgaccagcctgagtgccagcctcacctcactggcgctggaggaaaagcagtggcctacggagaccccagtcccaggctggctcctgttcttgctccagacagaacttttgaagcccttggtgttgctaaaagtgcttgtttcttggccccgctcctctcactctggggactaggagggctgaggctgttatccaggttgacagggactgctttgtccctcggtcagggctctgtcctcacaacctttccgggccttctcagagtctgtgggccacccatttggccacccacactgctgagggtcaccgggcagaaaatgcggagtttctgcattccatttgaagctgcttggtgttccgtctgaacaaaccatggtgtatttaaccagcctctgtggatggacggtgctagatcagtccttgttaatgtaacatcactcccatccccttctacatctccctgcatttccagagcccctttccagtatgtcctaggctgaattctgcccatgaaggaagcagaagccattggtctccagcagctactatggttaggcagcaaaactcatggcagactcctttcctcggcttctgggcatcaccctgcatgacccccactgcagtgctataagcagctgagatccagccagacacagtggctcacacctgtaatcccagcactttgggaggccaaggctggcggatcacttgaggtcaggagttcgagaccagcctgagatccttggtgacagcttccggcagctccaggtgtccccctgggcatcatgtgctttggccctgccagcaccgaggatcactggtgatgacttccctgccatctcctaacttctagaactttcctggcctttcctctcccagcccttccaatgcttctctttctgctcaaaatacctagagtggcttctgttttcttgattgaaccctgactgctacaaacaataccctcgcatatcctgcacatgccaggaacacatgccagtctatctgtagtataagttactagaagtcaaattttcaggtcagtttcaaggttgctggtgtattagtttgctagggctgccataacagagaaccacagactgggtggcttaaacaacggaaaatttatttcctcacagtctgaggctgaagtctgagattaagatgttggcagagttagtttcactctatgggtgtatgtgtccaaatttcctcttcttataaagacatctgtcatattggattagggccccaccctaacaatctcattttaacttaattccctctttaaagaccctgtctccaaatacagtcacattctgaggtactggaggttaggacttcagcgtgtgaattttgaggggatgcaactcagtccataacagataactagctattcccaactcaccctccctggcaattgtcccaaacagcaggtacatgaaatgtgtcagcaaacctggtgatcatcaccaatctaacaggtaagaaaatgcacatagtgttgttttaatttgcatttctcctactctgagtgacattaacatcttttcatgtgtttgaatcattcatatttcctttcctgagaaagatttgtacaggacaattttctaggtgaccttaaaccagcccggttctcccatctttcttgcttgtagttctgaaaattaactgtagaatgtgctagaaatgcaacatcttgagataagggggagctggccagaactgctcaggctctgttccagttccgccttagaaacagggtggctcatgcctgtaatcccagcactttgggaggccaaggcaggcagatcacctgaggtcaggagttcaagactagcctggccaacatggtgaaaccccgtctctaccaaaaatacaaaaaattagccaggcatggtggcaggcacctgtaatcccagctactcgggaggctgaggcagaagaattgcttaaacccgggaggtggaggttgcggtgagccaagatcgcaccactgtactccagcctgggcaacaagagcgagactctgtctcaaaaaaaaaaaaaagaaaagaaacagggtgtccttcaacactgtagctcagccactcacagagcataaagctcagggcaggctgcttttca

SEQ ID NO: 203 - DNA, 1605 bp, Homo sapiens
ggccttggatacctggcccgggatgctgggcggcgtcaggtaaccatggagaaagagctgcggagtaccattcttttcaatgcctacaaaaaggagatatttaccaccaacaatggctacaaatccatgcagaaaaaacttcggagtaattggaagattcagagcttaaaagatgaaatcacatctgagaagttaaatggagtaaaactgtggattacagctgggccaagggaaaaatttactgcagctgagtttgaaatcctgaagaaatatcttgacactggtggggatgtccttgtgatgctaggggaaggtggagaatccagatttgacaccaatattaactttttactagaagaatatggaatcatggttaataatgatgctgtggttagaaatgtatatcacaaatatttccatcctaaagaagctctagtttccagtggagtcttgaacagggaaattagccgagctgcaggaaaggctgtgctggcgatcattgatgaggaaagcagtggaaacaatgcccaggctctcacctttgtgtatccttttggtgccacattgagtgtcatgaaaccagcagtggcggttctgtctacaggttctgtctgcttcccacttaacagacccattttggctttctatcactcaaagaaccaaggtgggaagctggcagtgcttggttcatgtcacatgttcagtgatcaatatttggacaaagaagaaaacagcaaaatcatggatgttgttgttttccagtggctcacgacaggagacatccacctaaaccagattgatgctgaggacccagagatttctgactacatgatgctgccctacacagccaccctatcaaagcggaatcgagagtgtctccaggagagtgatgagatcccaagggactttaccaccctcttcgacctgtccatcttccagctggataccacctccttccacagcgtcatcgaggctcacgagcagctaaatgtgaaacatgaaccactccagctcatccagcctcagtttgagacgccgctgccaacccttcagcctgcggtttttcctcccagtttccgggagttaccacctcctcctctggagctatttgatttagatgaaacgttctcctctgagaaggcacggctggctcagattaccaataagtgtactgaagaagacctggaattttatgtcaggaagtgtggtgatattcttggagtaaccagtaaactaccaaaggaccaacaggatgccaaacatatccttgagcacgtcttcttccaagtggtggagttcaagaaattgaaccaggaacatgacatcgatacaagtgaaacagcattccagaacaatttctgaagaccatgcctcttgaagctttttctgcctcctgattctctctttgtaaactattttcaaattgtttttcaactccttatcaaaattgtttatacactctttcctccatgagctctggaaggtatatgcatcttctgtaatactcagataggtataagatttttcacaaaatccttatgtaagatacattccatttttaaaaattaaatgtatggttgcatctgtctttttataccctaaaaa

SEQ ID NO: 204 - DNA, 31737 bp, Homo sapiens
aagcttgtccagcccgccgctcaggacagttttgaatgtggcccgacacaaatttgtaaactttctcaaaacattataaacatgttttttctttttttctttttttttgctcatcaactatcgttagtgttcgtgtattttacgtgtggcccaagacaaagtcttattccgttgtggaccggggaagccaaaagattgggcatccctgtaaagcaagagtgactgacaaagccctggagctcttagataagtggtgagaataaatacagggaagataaaataatatcaagaagcaaggagagagattctggacttcatgttgattagaagaaatggcttgagtgattcatttaataacaacaaaaatatgtgactgtaattataccccaattactgaaatatctcataccagttctaaatattttatttaaatattttacttatttattcatttattgagacagggtcttgctctatcacccaggctggagtgtagcagcgtgatcacaattcactgcagcctcaaactcctgggctcaagcaatcctccttcctcagcctcctgaggagctgagaccataggtacatgccaccgcgcttggctaagttttaaaagtttttgtagagacaggatctcaccatgttgcccaggctggtctcaaactcctgggctcaggcgatcctcctgcctcagcctcctaaagtgctggattatagaggtaagccaatgcacccagctggcaaacttatgtcgtgtgcaacactttgcatataggtggatttcaggacatgtttgttgaatggagatgatggaattaaggctcatcaaaatccacactgatagaaacttcacatacttatccattttatttcttacaagctgataaatgttgttatcctcattctcccgatgagctgttgaaggacccatctccagtagtgactggtggaaacagtattggaacccagagttgataactgaacccctgccagccccactctgtcatctcctcggtcagttgggatgctgccggggtgtctgcctcagcctcggacacagagtggtgaaacagatgatttcgatggatatagttaatggaggcctggggtcggtgaaagtgatttaattgaaacgaagtcaaggaaagttttacaaagggagaaattaggtgttttctcctgagacttatgatctggtgagaggattatggtactgaaaatcctagcaaaggcatcaaccagcaatacttgtgagttccattagttacaatcatctattactgggaatgggaagggagaatggaatcaaagaaagtaagttaaaggtgtttgtattgaaagccagaaaaaaaaaataaaaaaaattaaaaaaaaaaaggtcagccaggtgggaaaataaaagagaaaaagaaatattttgataaaactgatacattgagattattcaactgaaataaatgttaagtgtatatgggtgattttgcaagaagtcctgccaaaatcacatgaggttaattattttgacccccattttctgctcccacacttgactgaggacattccagactggaaatgacacctctgccctcagtaacatgtctgcagcaactaatgatctctctggagtgtagctcaagttcctggagtgcaactgtaactctagaagcaaattggctttgcactaatggcttcaacataattgctagtagtttctggtccattctggcaagaaacacaaagaatgcaattgttaagtactctttttcttttttttttcttttcttctttaagggcctatggttcatcctgcaatatcagagaatacacaactgttggaagctcatttgtgcagaagcactagttagaccaagtcccaggatggtggggacttgaactgcctcatgcacattgtacccaagagcctggcccatgaaggtgaatcagtggatacttgaataaaaagaagaatatgcgctgaagttttctttgaggacatttttttttctttccatagttttgagcatctctgatgttttgagatttctgccagtctttgaggatgtaatgctcaattagacttgttctctgtcctcaaagagcttatataatagttagtgagctaattctcctgttttgagagacaggagaaaatgttatgttataatgagtcattcagactctatctactaggcctgactttgttactttttaaaaagcattcttccactcctgcttggatatctctgtatacaagactcagagacacgtatgacgccccttaggaggggttctgacgtgcaaatttctgagacccagaagcacctaccttccattttccaatgccccaaattctatgaaaaccacgagcacatgcattcgttcccatgttctcgggtgcctcgcctatcagtcaagggtcacaagatctgcagggcagttgctttcaaaataaaatggatgtgaaaacagctgaagcccagcgagcacttgataactgcttcttttgaaggcaaaataagattattctatgaggtaacaggctccttctgggcttaagtaggcatagggtttacagtgtagattcttgtgctatggttttcccataaaagagggaaaccttgaaatcacagcacttttgtggtagggaggatttcaagcagtgcttaataaggtgtacatgaccatagcagagtgtccccccccatctcagggaaaaggcccctgaaattaatcatgagaatcctctcctgtccccagggacctagatgaaccctgactaatgaatatttaaatctcactctttgtctgctctcacactcaaaccctgattcatgactgtatgctttccatttggcatggaacagagatcacaagtccacagggtatagctccatgccacctggggctcctttagacattagtattatagtaattaataacggcatcttatcattgcaagcttttattagatatttatcaatggtttacatactttagctcattacattctcccatcattcctatgaggtgggcacttattgctcccattttacagatgagcaaactgaagtttaggcaagggcaatagcatgctccaagtaacatagctggtgtgggtgggtccaggatttaaactcagtcatctggatggcagcacccaaacccttacccacgacactcagtggcctcacaaggcacctgggtggtggcatgactcaatgaacctgactctttccggaagctcattcctgcaccagcagtggcactatgggcatttcacttgtcctcttgaagccttagtctctttgcctaaaataggcagaataaactcacaggactgaatgagatgttgactctcaatacatgttgatttccttctctccgtggaaatccatctgtacagaaagctgagtgggacattttaatgtcagtgagcttatgggtcacacagaccacaaatgcatgcctggttatcttatatacgggtgagaattgggtttacacatcaaagcatttgagcactgacattgttttaatcaatgacttcaagctctattggattataactcttcccaataggactacatgtattgtgactttaagtggagcccatgaatgttttggtttcaggtggcagcctgtgaatgttttcccagcaaagttaattaaatgtacccgacgctctccatgcgccttccctgtctctcacacagtcaggcttgcaatttcatgtgctctcccttgatctatttttataccatcacataataatttatctgctaaatatatccatcatgctggatttgcatttatttttttattaagttgcctgccagcctcctatagtttaatcggtgtttactcaactctctgagtactggagagtgtagaattacaagacgtgggcccaaagccagcctctggtagctgctctgctctgtgacttggggcaatccctttctgtcaatccaggtctcagtgtgctcctttataaaatgggagcaggagctacactgaagagttgttgtgtggtttatggaaggtaagatagtaaatgcaatataaacagcagggtttgccattagaaatggttcatctttgcatgggtttattgagtattacagagtccttagctccatgcatgcagagataggcaaaacagggaggacagtaagcttaagggctgtggaaacagattggccctgcttccagctcctagctatgtgactttggacatatggtttaaccttgttatgcctcagtttactgtaaagtggaaatgatcattgtacctatgtcactggtctatattaggattcatttagtggttcccaactgaggatgattttgtccccaggggacatttgacaatgtctgcaaacatttttggttgttgcaattggggaaggggggtggcgctgctggtgtctggtggatagaggccaagggttctgttaaacatcctacaatgcacaggacagctccccacaacaaataattatccagcccaaagtgtcaacagtgttaaagttgagaaactctcattaactaatataatgcgtatacattcttggcatagttattggcatatagcaagtgtctaccttgaagaataaagttgattgtgtctggagagagtaatagaatgccttaatgccagctacagcagtaggattggaaactggatgctaattccactctcagtcccctgcacacccagctccatcacagcctattcccttgtgctgactgtgtgcatgccagtctggctcatccatctgtcagctccttggatgaaaggcattagcctgattcctctttgaatcccttctgatgtttagtgctgtgactaaacagcataatggagaacacactccattatggtcagtgaaatcaatagctgccttagaggtggttggcagtttggtttgaggagtggtagagatatatggatgtaggagtcaattgctcagtaaagcaggtggggctcttataggaggcactgatgagggactgggataaagaagcgaatcctccaagaacacttggcctaggctggaggctgttcaggctccaaaccatcacagaggatgaaggagcaagagtttcttaatctctcccctgggaagactcctggtacttctatgggacagagccaaggtgagtgttcacagaaccaccaaggactggactaggtctacaaggcactacagaagtcatctggctcctatgtttgtcttaggagaaaccagtggtccagctaaaaactggtagaagctggaccagagcctatgggaacatgtcttaatgaacattacatcctcacaagctagcagagagcttgatacaccagaaatgcttagtaaggtgtaaatgcctctagcagagtttcctctcccatctcagggtaatcaactgtgagggtcccttccttgtcccatcagacctagatggaccctggtccatgaatatttaaatcccactgcttgtctggtagtctcacaatcaaaccctaattcaagatctcaagtccacagggcataatagcttcatgtcacctgggtctcctttagacaaaagtagtgattataacagtggtattaatagtgacatagttactgaactttattagatacttattggtactttacacactttagctgatcacatcctcccatcagtcttatgaggtaggcactgttactgttcccatgttaccgatgagcaaacggaagtttaggcacgttcaatagcatgcttcaaataacactgctggtgtgggtgggcccaggctttaaactcacaatcacctgaacgtcagcaccaaaacccttacccacaacacttgacggccttacagggtacctgggcagcagcatgactcaatgaccctgaagctcattcccacaccagcagtgacactgtgggcaatttacttaccgtcttgaagccttagtctccttgtctgaaaaataggcagaataaactcacaggactgaatgagatgttgactcccaatacatgttgattttctttcttccacggaaatccaatctgtacagagaactgagtaggacatttcaatgtcatgtctcctgatgtcccctaatccagagctcccccagcagtatgcacagacaccgtgccttgcccacccccaggagtctctggggacaatgaggctgagtccctaatttcttggtatcctcccccattgcgttagcaaagtgcccagaccaaaattaggcaataaatccttgctaaattgcatgcataatcagacacagaaaaaaggaacacatatacatatgtatatatagtatttatacttgtatattacagagatagagggaaaagacacctcattctcacgccttcaaccataagctctagttctcctctttttttgctttttagatgagacacagagggacacttgggggctgaaaggaaggacctccctgctagagctgcacggccaagcccttccttggtgctttctctgctatctccagctctcttgctttctcttccctggggccacatcttctgatcatgaccagtctagtggcattaccatgctgcttcatatgttgtggctcagtgagttgtctgtggagaaacttgactaatgaataatgacagagtagaaagaatgtgaaatgttgagtcgggaaaccaggatttgagccccagttccattatctcatcagggtcctttcactctctgaacctcagtttcctctctcataacatggaaacagtgacccctcttctgcttatggaaatcaaataggatcatgcctactaaagagtttcacatcaagtgggacacagataaaagacattatgagtgccacatccatgagatgaaaagtcctatgagagtagagactatgctttttaccttttgtatgtccctttgcagtgcctaccactatagaggtggtatgtagacaccacatccccatgtagtgcctacatgttaaaatacgtgcaatgaattcataatagtatgcatattgatgcatggagaaagatgaacgtgatcacaaacatagatgcatttctccttttccccctcaattctatttttctcttttttattcccatttcattacttatatttcattttattttatgaaagagctaggaaataaataaagtgaattaaaacgaatacacaactacttgtatgggggttatggaagtcatcaaatgtgaatgggcacacaaatgaagtcactgtgatctgtacacacttaagtattttttaaaagagcgaagagatggatagagacgggaggaggtggggggcatggctagaagaaggtaggtagggttgatggtaaaggaggctgtgtaataagcacgatgatcaaggtatgctgaaataccaccactgccaaccgctggtcaccaaagatcagaggcagctgtaaccacacgcatagaacacaagggggagaggaagttccacccgggaaccaggcaaggacaaacttctctagcgctgttcctctctcccattttctgtagagtgtagctatggccaaggcggtgctgatacagttttgttgaaagcctgtctgttgatggtgggcttcagggactctctgtgcacttctctttatttgtgaagcagttggctccagagattgagtgacagggagaaagcaaacagagatggcttctttcttctatttttccttcgcaggggaaagagggacagaagtagactaaaagaggagaacacatacagacaaaaatagaaaataaaaattatttagaggaaaaaacatccagtagaggatgaataggaaaggagtggcgtggggtggagtttcacacctttgaggaagggaaatgacacgaaataaaatcagaaatccaagcctcctgctcctgggtactttcctttacccatcggagagatttgagtcaggcctgctttgtttatttaggagaggacttttgtttctttaaacagaagtactgggttaaaggctcctcaggatcagatggctgtggtcaggcatggtccagaagccccgctttagaccagtgggaggggtcagcccttacatgactaagggactataggtaggtgtgcctctttaaagcaaacaaaataagggaaaattaaaagctactgattttacactgaagggcgaggactcaaatttcagactaattttttggctattaaaaaatgatttgaggataaggaacagtttggaattcctcttgtgaattttattccatattgcacaccagcatttactaaatacctactgtaagttatttctgtatgacatcattatcctgttagattggaaagtggagagaagccggcatgggaagtgccaaggtaagcagtccatttcaagttggaagcgaagacagaatatttcttttggccgggtgcagtgcccatgcctgtggccactgctttgggaggctgaggcaggaggatcccttgaggccaggagctcgagacaaacctgggcaacatagggagagcccccatttctacaaaaaaggttttaaaaattagctggatgtggtggcaccttgtagtctcagctactcaggaggctgaggcaggaggagagcttgagtccagaagttcaagaccacagtgagctatgaccatgtcactgcactccagcctgagtgacagtgtgagaccctgtctcaacaaacaaacaaatgaaaacaattttttaaatagggtagctaaacagtattcagttcatacctaaactcaactttcacctgcacctgtggttttgtaggcgatggagctaaggagtacttggtcaatagcaccttaagtcaggagttttaaaatcaggtaactcagccaagattctctgggtgcacagattcctcttggccccctgcactgactcaggctccagtgaggtcttccctgggtgctgggggtaacaatagacagggttgagaggtaggaggtgcctctcacctgcctcaggaatcaggctcagggcaggccccaggttccccaggattagaagaaggttccccattctttcatctcagagagggagcctcagcatcagagctgaatgaattcactcgtgttcatttgttcatgaattcttgtatttctgagcatctctcatatgcttcaatcctggggatatggcttctaacaagccaggcagggtctctgcccccaggtggagacttacattctggtaggaccaacagatagttcacaaggaaatgagatgaattgcagaaaatgattagtactgggtagaaaaggaaacttgtaatggaatagtgagcatggtggagggtggagatagggagaccagccaagatctctgtggggccgtgacacagaagaagccagctgcaaggaactctccaggcagaggaaaatgcaagttatgaaactccgcaaaccgacccagcatacctgatgcataggaggaactcctcatcaggtctggtcctgggtgggttcctagagctgccctcaataaccccgtcaaggaagagagcctttgcaggccccaccccagagatgctgagtcagcagaggtggggaagcaggaatcagcagtttaacaagtgttgggtgattagaattcacctagccctgccatcaaactgctggagcagatggtgacatggggttaatgaccagaatcccagattcaaactcattttatcccattaactgggagttaatgatttggtcaagtcttgtcaaattgcagcaggaggaggaggcctcaggaatgattgagcacaaatgaaaaaacagcacagagatgttccaaggtttcctgaagccacaaagcaacacgagttcactctggggttcaggtcaatcggcagctgggagccccagaggtccactcagtgtggactagttctgtaggttttgcctggaaagaaaaaagaaaaccagctatagacaaaatctcagtaaactacccattaaacgtctggctttgcttcacatccttccctggtatacctgtcatgacaaattacttgctaagtgttcaccagctgactaaatgggaatacgtgttgtatgaggcgtttatttataaaccaaccaacagcaaagagatgctttggttttacaatagttgatctttaacccttctttatgggaatgacaaatcagagggaaaagttgtattttgagatcaccgagtttcaaattataatgtcatctgtttattagcaaagaatgatttttcccctttaatgagcaggtggtggccatggcatgtacctagcacatgttaagtagcaaattagcattcgagctgagctgattgtagatctcagtttccttaactctcctgcctgttactctttgcagaggcaggaggctgcaccctgagcttctaaccctccccagaaaccaggctcaggactggccttaggttccccagggttagaagagggtccccctccttgcgtctcagagtagcaatttcagggtcatagaaagttaattaattcctgacttcattcataagtgaataaatttgccacagcagaaatatgggcatgtggtctaatagggggttaaactgcctgatttgcaaatgagtttgtctgaaaagttctttaatgtcttgtcatacacttcaccaaaaagaccataattatacacaattaggtcaatgcttacaaatctgggccaaattgacccactctaaaaccaatctctgttaccactagtgccaagcaaataggtattgtaaacctgattgaagaggggaatgcttaaccaactgaataacacaaaagcatttttaagaatgatagaatatctgatgcctttatgtaaaccatactgctaactgcgagtgagtattatcaattaaagagtgtttttaagaagatatgtggaaacgttttattagccatcaagttgaattgctacatgtgatagaaaatgttatagcagtatttcttaaagaatattctataattcagttcctgttcaagactgttgccatcatggtctgtgctattgaggtctcgttgaagcatttctattgagtttgtggaccacacccttcagactcagacacacttgggtttgacatttaagccctctgccacttttcagctgagggaccctgggcaagttagcttttttctctgtactcagctttctcatctgtaaaatgggcttggcaataccctcctctcagagttactgataatgtccgccaaatgtcaagcacagagccaagtgcccggctgtgaaatgcaccattagagctattctcttctagtccccccttcccaccctaaatcgcctcaccctcttggaaagctttagtcaagagctgcttcagaagaccttgagaagaccttaaggccatggacaggaagcagagtagtgtgaggagtgtgtttgacactggcctacaggaagggatggtgacactaacaggtaaacactgctctgggcaaatgatgtcttctagagctataaatggttctccaatcacctgtaagagagtgccaacatcaaaaacgaatgttctcttcgtagtcatcaagagaaagtgtcaattgctaagtgtctaaattgtaccagacactttataatctatatctcgtttcatttgcacaaaagttctgtgaggcaggcattctaagctccatcattttggaggtggggaaactgaagttcagagaagtttagtcacttcccccaaggtcacagagcatcacgttatgtttgtaatcctcaaaacaaacaaatggcgaagggtagaggtaagcagtcaaagagtctaaatgggaaaggagcaattagagcaactctgagacccatctcggcacacatgagaaaacatgtctgggacacgaactgagagaaaatatgatcctgtgaaaagaagaggcttcatggggaaaacagatctgggctgctggggaggagggcggaacacagcctgggagagggctggaggtggaaggaacatgaacagatatggagcagcatgatttccagctgggcagtgctaatcccaggaacccatgagccatgttgcttctctcgctatccacaccatggagcagggacttgtgtgtgtacctatctctctgcctcctcccccgctgatccttgagttatcaaaggcaggacatgtatctcatttacttttgtttccccaaaaccatacagtgcctggtatagagttagaggccaacatacctattaaacaggtggatgagctgaagattagcagattaatccaggaagtcttcctgtaggagagggcctggagctggggaaaaaaaaaaaggacaacagagatgtggtgtggtagaaaaaaaggcatagagatgtttaatacaagtgaggaactgatgtgtgtgtgtgtgtgtgtgtgtgtgtgtgtgtaatcagggacaaagcatagaaaggactgctcctttcctaaatttgggaagaagtgttccggatctgctttaacaacttgcattttggagacaaatatgcctgagttcaagtcccacctctgacaccactaactgtaacttggacacagcactttacttttgtgagccccagcttcctcacctgtacaatagggataataacaagaacatgtacctgtcaagatagttaagagggataagtaagatgatatgacaccctcacacaggtcctgacacatggtagacctttgttaattttggtcctcctgctttaaaaacctgtgtcctatcctaggagtccaggacctcttggttaacgaatatgtgaagtttatcaatctttgccattgtgcttgcttgtgatgcttctgttctctgagctcccaggatcaataaaccactgatttaatgctacaggttgcttcagagtgcacctggatgtttttgtcagtggacctagtttagcaggggtccagatggaatgaaaacatatttcagagtagagctaaacctagagggacgtgccctcagctgccttcttttccaacattgtccaaggagtatgatttaagcctggaaagccctgaagatgagagcttggctcatcaaggtgactccatgtggctctgccccagcttggcagtgtggcttgggatggccactcagactttctgttcccttccttctgatgggaatttagcaccattgattcagtaggttctagccatttgagctctggcatgggccaatagggcgagccacactcacctgctagcaggagctgactgccagtggagtttcaggaaaaaagaggtaggcagcggaaaggctaattctttgctcccacctatagttccggctgtacttccatctgacaaatccaggatcagaatacacacacacacacacacacacacacacacacacactgcccaaatgtacttccatctgacaaatccaggatcagaatacacacacacacacacacacacacacacacacacacacacacacacactgcccaaatggaatggtatgcagccagtcccacctggagtcccagttgcctttctctttcaaatacagactctcccgacagctatgtggcggtgggggaggcgactacttgttgctccttctctgaggctccaggggcaacttggcttttctgtctcaggaggggctcctggctgctctcctagaatgccccctcgctgtctgcatcagaggcactgtgggtttggatcgcccccttccttctgcatttttagcattctcccctctggagatcccaggctgggtctaacctgggatccctgacattgatgcaaaggaatgccgcctccaacctcacacctggctcctaggagtttagcactgtcttcctgccacctggggggcggggtgtcatgtcaaccctcgaagaagcccccactagctaccttcaaaaaaggctaaaaagaaaacttggagaaagtccccagcccccaccagcccttctcccccgccctgcccttccccccaaggcagcctagcagggacagggagctggggcgggggaagcaggcaggctttgtgacctgggggttgtcccttttttcccaggaggcgaggagagaatggatcccggtctgagctccccgcttccgtccccagtctccagataccggtcctcgcctctccgcgccgcgcgctgcctcctctccccggtgctagcagcggccgctggcatttggaattctgcccacaaaagggggcctggaggaggaggagaggagggacggaggccggcggcgagaaacggcattcggagtccaaaacatcatgggaaaaggaaccgagcggcggcggctctgaaggctgtgccgctgcgcccgaccgcagtgcatcagcgtggccgccctgacatcccccaggatggttaacatggggcattatgcgctggttaacaggctccgagctgctcagcgacttgttttaagcattttctctctcgctctcgcttttaatcttgtctctagtggcgtgtgtaggggggaggactttatttccattggctaagctctcccttcccacccacatctcttccacatcaccttggtgtctccctaaataaaaccagccctccttatcgcctggaaaaaatcaagagctagagtttgaatgggttttatataaacactcacccctgtcagcgtgcggctgggctctcaggataaactcacagcatctggcgcgatgcttgccttgcgttctctcccctgaacgtcaaggtttaagcagagcccgaggactgggagctcttctctgaaattcgatcaacctgaagccagttgcggaactgcacggggtcccgatggacctcaaggaaagccccagtgagggcagcctgcaaccttctagcatccagatctttgccaacacctccaccctccatggcatccgccacatcttcgtgtatgggccgctgaccatccggcgtgtgctgtgggcagtggccttcgtgggctctctgggcctgctgctggtggagagctctgagagggtgtcctactacttctcctaccagcatgtcactaaggtggacgaagtggtggctcaaagcctggtcttcccagctgtgaccctctgtaacctgaatggcttccggttctccaggctcaccaccaatgacctgtaccatgctggggagctgctggccctgctggatgtcaacctgcagatcccggacccccatctggctgacccctccgtgctggaggccctgcggcagaaggccaacttcaagcactacaaacccaagcagttcagcatgctggagttcctgcaccgtgtgggccatgacctgaaggatatgatgctctactgcaagttcaaagggcaggagtgcggccaccaagacttcaccacagtgagtacttggttttcagctcactctgtctggtcctctggagaagtggtgcgccggtggtctcctgcttggtttggggtttccttgtgctttgggacaggagagagagcagtgcctcacctgaaggccacgagggtagttggtcagagttgtgcgagctggttgcagggaaggctaccggccaggatagagcactgctgtcagatcaaatatggagggtgagtggggggcttgcggtgggggatcacttccccagacgtgctcagttggcttcctcccagtcagagggaggaggcctgggctgtccgttgtccggtccgcttggtgtccgagctgtgtgattggaacagcttgtcattgacgaggtggcattctgtgtgtgtgtgcgtgtgcgtgtgcgtgtgtgtctctctctgctcggaagtggcatcaggcactgcatcctgtgggctgggctggagctaaagccgtcagagaagggggtgtggggcccaggcagtctggctggctccggtggctttgggagcttgctggagcaggtgatgctgcagaggtgtggaagtctccttgcttcctttccttgtgtgaattctaagctccatgtggggagaggagaggccgggcaccccagggctccatctgatctgttggcaggttgaagccaagagatgttcagagtgcttgggcagagaggagggtctgggcggaggcacgtgtgcaagagggtcagggagatgcctgtgagggtgaaccagtcccggctgccttgtctgggagctttggcttgaaactcaaaggctcggttttctctctgtataatcacttaacgacgtggatgcaggaggaggggtgcagggagggggcgaacagctgtgggaatggaaagcctgggggaggagtgtggagctgagtaaagaggaaaagcggagggggatgtggcttacgttcaggatggggcttactggaggggcagagaggaaaggacgagaggagcactgttgctgccagggttctccagttagtgggctgctaggcataacttggcataataggtcatacagcagctgctgactactgtttgctgccaggcacgtctgggtatcaggggctgtgggaccctccagaagtccagtgtggctgcttcccccatagctgccttagggaggattgagagcttttgagtctcagaacgttgagccaaaatgcaattgcaagttgggaatagcaggtatagcagttgggaaggggctgacctgtgatccagcacttgtctagggtcctctgcctaatgaagacattgcttacctttcctgtgctgcatccattccctaccccctcttggattcaccagcctcttgatctgaggttcttttaatgccataaccagtctctgcctgtagcctctgtaattgctgttggctatctctgattctgaaaaagcccagagtgccgggggcattgcctctcgcagtctgtgtgctagaactctgtttcttggaggagctgttttgtattatcccttttaagccttgtgaggaagagcacagcaaaatcggcagtagtgtatgctaaagaggaagccagtctgagctgggagaagggaccagtaatattggaagctcttctaaatgcagcaaacaggatcctaaaacatgtcatgcacaaatgatgtcttaggtggcttgaggagagatagagaaaatgccttattcttggaggctgaagccatcactatattccaccccgttctttctagcgcctggcaacgctcggcttcaccactgcaccgtgcagcttggaaatgcactcagctgttcctctgtctgcctgaacacacatggaacacacagacgacacagagggtgacacagagagaaactgtaataagtagcagactctgggttgagttctctagcttcctcctgactgcatgtccaactggtggcttcttctgaatccatgtctaagttccatttagaagtaaatgttttttgaccccaggctattgttttatacttggaccatctttttacttgctgaggtcccaagaggtctttaagatcaggccttaaagttcgcctgagcttttgacctctttgtaatgtttcccaaatagtgaaattgcctatggataatatttactactctgtcagtggcatgtcattatctgctgtcctcagcaagttcaagagtaatctatttgagtgtccattcctcaggctggccctctatgtgtgaccttccccatcattgaaaagggggtgagcctcagtgctgctgttcaagttgttcagggagtatcagaaaaagcatctactccaggacagcccaacgaggctccagcagggaggctggtctctggccccagctgggcacagtgggcagcaatgctgagcctttactagagggaacatgatgctgagtttgctcaagaccttgtagtgaggagtactcctcccaactcatcctttgtccctctgtctttttttggcctgggatataagcatccttcttattgggctgccataccagaagagggcagagagcctggacaggtggttgttggagaagccacttgacccgccttctcttattcattttctctgctgtgcatccctctccagttggcttatttttgaggctctatctaggattgtaccatgctaggtgacttctttctttaagtgcggtggctgacttattagagaagttaagtatgggggaagggatgtcacaaggggatggcttttctctgtatttctttttctatgaagcatatctagtggcatctccagtgcaaatgctctagcataagctttcttattccaagctcttagctgatgtgcaatgaagtgtgtaataccctttaattagtgaatgagccatgattctagcagagtgagagaaggctgtctgcggagggtaaaagtcccagggaagccaggtgtgggatgctgactacaatgtaaacaggtgtgcttcatgctcatgcaagtacactcttagccctcaactaggacaatctgatttcagataagcacacgttttttccctcctggaaaagcagaagacagctttgattccagattgtctacttagggaggttgcctcattgacctagagtggaaggaaggaggagggattgtgtctctgcccatggtgttggataatgtgagtgcaagattaagagcagaaagacaaaggtttgaagcccagctacaacattgtctttcttattccctggttgtatcttgcgtcctctctaggcctcgacttggtcatctaacatgtgatagtaatatttgacttactaacccacagggatgttgggaggcaatatatgtgtacactgtgccagctacaaagatggaaggtggggttggtttccatattagtagtcgggctattcacaggagtcagacctgatgagtaaagctatgaaagatgaaaccagggagggagaggtggctactgctttctctgtttggagcagtgggtttacatccaacctgactgagatggggtttcttagaatggaggtcacagttggattcgatagttaactcttgctgacaggtggtggccctactgcttgtgtccaggacatggttattttatgttttttctctgctcatcatgttaggggtcatctgactccaagtacagaaatacaaatgacatttcagtttcatacttaacctactttcatagttgtatgtgtttgtattttaaatttgagatttcttaggaaatacatttctttctttccttaacaaaagaaaggtctctccactatgagatcttgttagaggcattgtgtagatcttgttaactgacatcacctaacattatagagatggtggaggtgaaggtttaggaagatcacatctttggaattcttgcacaaggccaaatgggtccatagctaatctagtctatcttttttaaaaaaattattattattatactaggaacatgtaggtgaagaatgtgagttttagggagaaatctgagttggaattccaactctgccaccaatttgctgtatatttttggacaagtttcttaaccttgattgtctcatctctaaattaggaacaataatacctatcacttagagctatcgtgctgactcagtgccataaaatatgtgaaggcctactatgtggcaggtgcctagagcagggtaggcctcttgctttgcttagtgtcccgcaggagctcactcaactctcagtccagtggtttgctcactattccatactataacttcaccaacagctttggagcacaggcaactgctgtgttggtggtattctcaattctcattatatattaagctttcacttttctctgtgctcttcatattaattctgctgctcaaacgtcctctccttacccaccatcttggcttccacatcgaatcccatgctcccaaactcaactctaggaagctcacttgtcctgtgccagcccctctccccacgccaggaatgggtgacctatgcaccctgtgcacagcttttatagcagtgtgtcatagtgcttcatgcatggttattcctttgtcaatcaaatagagcacctattgtgcagtgtgataaaaatagcctaaagccttgccattgtagaactcccagcccatttcccaccccctccagatgaggtgatagctgagtgcaagaatgcagtctcattaaacccagactctgcatacatcatgctaaatatgggggctgcccacaggaaataccatgacccaggcatggcttgctaattgaatagttacttgctgttcctggaataaacccagaaccctttactcacggacctttcctactctacctctttattttttttttttttttttttcttgagatggagtctcactctgttgcccaggctggagtgcagttgtgcgatcttagctcactgcaacctccacctctcaggttcaagcgattctcctgcctcagcttcccgagtagctgggactacaggcgcctgccaccatgcctggtatttttagtagagatggggtctcaccagattggccaggccggtctcgtactcctgaccttgtgatctgcccaccttggcctcccaaagtgctaggattacaggtgtgagccaccacgccaccctctttactttttatacctctttctccatgtctatttatctaaatcctagtcatccttcaaaatccagctttaccatcactgtagccttctccaggaaaccattgcccatccccttcccattcccataatctaaattactctctcgtctgtcttctaaacagcattttggtttattcctctgttagaacagtcattattctttttcttgcattagaatcatgaagtgcttgggctaaaaatgaccttagaaatgatttaacaccctagttttttagccactgataatttttaattttaaaaagtttattagtaaaaggtacatatatttatgatgtacaacactgctttgaagtatgtatacattgtggagtggctaaatcaaactatttaacatatgtattacctcatatacttaccattttcttggggggatggtaagaacacttaaaatttacccccttagcaattttcagttgttcaatatattgttattaactctaggcattatgatgtacaatagatttcctgggcttgtctctcctgttgaactgaaattttatgtcctttgatccatatctcacctatccaccctgccactccccagtccccagtaatcaccattctactctctgtttctatgagtttgactttctaagattccacatagaagtgagatcatgcagtatttgtctttctgtgcctgacttatttcactttgcatagtgtcctccaggttcatctatgttgtcacaaatgacaggattttcttcctttttaaaggctgaatagtattccattgtgtatatatatcacaaatctttatttattcacctatcaatggacactaggttgattccatatcttggcttttgtgactagtgctgcaataaacatgggagggcagaatctctttgacatactgatttcacttcctttggatatatacccagtagtgggattgctagatcatatggtacttctatttttaatttttttgaggaacttccatactgttttccataatggctgtactaatttccattcccacccacagtgtacaagggctcacctttctccacatcctttccaatgcttgttattttttgtatttttgacaacaactattctaacaagtgtgaggtaatatcgcattgctaactttttacaaatcgcatatttcttttttctcccctcctcataaggcctgatgtcttcactcatccttgtattcttggcacctagaattgcttagcacatagctgtcaaactgcttcttcagagtttgggtaaagtgggtttgaagcttgtttaatgttaagtaagtctagttgatatatggtgaaattgttgttttcaagcttctttttgcatcatgggtagccaggattccacctgcattgggatgacttgtcccattattgttattatttaataatacactttctgattatagaagtaatccatgctcattggagaaaatttgggaagtgtgggaaataataaagaaaggagaaacctgggcaatatagtaaaacccagtctctacaagaaatacaaaaatgagccaggagtggtggcacatgcctgtagtcccagctacttgggaggctgaagtgggaggttagcttaaaactggaaggttgaagctgcagggagccatgatcacaccactgcactccagcctgggcaacagagcgagacactgtctcaaaaaaaaaagaaaagaaaaaaaagaaaaaagaaaaaaagaaagaaaagaaaaatcgccattaattgcttcccagatataattatatatattattttagcattttgggagtactcctattcagccatgtattgtgtgcatgtgtgtgtattactaggcctgggatctcactttttgtgcatctggtgtcatgtctgctccacagtacacatccaatcaatgttagcttgctctcttcttgagtctcctgggtagtcttgaggtcattaggagattccttccttttaggctcaaaactgagcaccagttactctcctttgatggaaatttattgatagtatttctgcttgtttatctgatgccatcttggtcctactgttttttgaatgtttgctaagatgcaccagagatgtgttcctttacacaaagtcacacatcctgacaggcccaaccctgctccatgatgaggcccaagtttgagtcaactctggttcttcttgcaaaaccatccacttctcgcaagaccacctcagcacacagatgtagatcctgactctcccgtctgtaaagtctctagattctatgtcaaaatggcctaaattgtaactaatgcaaaatagatgatttttcatattccttaggatgctctgaagtcttgcgaacatttggcatgcccttatgggggcaacctttgtcaagctaagcaagttttccataatgtcagcctccgtttgggatcttccagtttagaactttaagctgtaagctctctggaagtcgtgctttcaggggtatataaaattctttctgatgtgatgaaggggtaagacaatgactgagagctgactattttgatgacccacaatgtctacttgcaaagaaaaaactgaagctactgcacaagttcctaaataatgcctagttgattgttgggtgaatgtgcatgtctgtgtctctttctctggaagattttagacatccagaactgcttagaaggctacctggaagcttattggctggggtgttggttcctttcctcctctgtattgtagttctcttttcctctctatagaaagttcttccattaatgaagagatgaatttaacaaaattttggtaaagtgaatcctagtttgctactgatttcttttgtaagagctgagatgtggtcccattaaaaaatctcccaaagaccgaattggtagcatttagcactaagtttgccattagaggtggtgctccatagagcagcccatatgtcaaagtgccacgcaccccattccctccatgagactaaaacgataccacctgagtctagagagacctgaaaatttgctgtgtgctttctcttttttgtaggatgtttatgtttgatggagctgagttaaaatatctaccttgaccagcaaggccatttgacccatgatctattacaacctgagaccaagcctacatcacccctcccagtttgaaactccatatatcatatttcactcatgcatttgacttaaaaccatacagactgggcttaggggttgctggatagcagctgtctccaatgctcagaaatactacatggttattatttgataaattgaaattctctgataaaagcctgtttatcaggttgggctttatttgaggacagcattccccaaagtgccattctttggatgctgaagcatctttccatctcccagtacttattttcttctgatttcgatatattctctattgattgcctcagtagccattgaaatttatgctcagaagaaattaagcatataaaacagaagcaacgtatttgcctggatttatgacctctgtagatttagttgcacaacctttgggaaggtaataagcctcaatgggcctcagtttgcttatctgtaaaatgaaggggtggaattaggtggtttctaaggacttgccaacctgtaccgctctaatgcaacagaacatattaaacatttgttttctgatcctacatctgttgctgaaactcaaactttaacttatgttgggagtggggaggagttgctgctcatttgccaccagatctatttatctatttatttgtttgtttaattataacaattttattttgatagatatgtacaatggaagcagaaacacctagatgcactgagaggctgcagcaggatgagggaggcacagaatcttgctctcaaaatcctgttcaggagccatgatatgcctgactgaagctcatcattctgactcaaagtttgcagcacagtagtccagcagttgaggggagtgatacactctgggtcttccatgcgtgaattagcaagtgtatctgtggaagacactgttggtcagcccagatcctctttactgcacctgtaggtagagcacataacagcttaatcagtccccttcgtggggaggctggcccttggttgacaggtgctgcctcttctggagatacctgggaagttattcacctccccaccacctgggggcagccagtggccagtgactgactgacaggattaggaaatgccagtcatctcacctcaagatggaatacattgtggtgcagtttacactcagtgtttcccgtgggatcaggctgagctggacttctcctgaaaccacattcatgcttaccttttcccccgccctaccttccccttcccgcttctaggctttttatgagaacactccctcaataaatcacctgtagaaggtgtgccatctcaggctctgatagggaacccaacctgtgtattgattagttttagcttttttatccatatggtaacatggacaatagtctaggcatgtggacctaagtctggtttagaaagaaaaaaatacctttttcaaaaatcttttaaacctgggactttcaaaatctgtgttttcaactcaagacggcgataacaattcccaagggtggccctcataactcaaatgagcatctctctgattgggattcactactctaagcacagctggtttgttccccttagagttgtttgcccaaagaaagcccttcccaaggtttcccttctccgaagagctgagccatacccattctcccagctgttacgtgactctcagctgctcacattctagcatacacttttatcagcacctgcattctcatttcctaagtttgctctctctgaaaacttccctttcctacccttctaccagccttcacttccatttcttcctgaatgtgcatcagcctggcttcaagccatgaagaggaggctatgcatttgatgttggcagtgtcctgggcccatcaataaagtagaaggcagtgagagatgtatggctgaccagaggtgatgctcctcatatgtcacagaaaccacgagcgatgaggagcgtatgaaagaactcagacagcttagcatgaaaagcgaagtgggtggctcacgggcaatatgagagctgttttaaaacacttcgaaggcaatcatagagaagaggaatgtgactttctctgtgtgaagccagggagcagagctagcaccaatgtgtgggtaaaagtttagataagtggatatcggcagactagaaggagttgtcctaggagtctagagcaccctgtaccctgccatcagctctagctgaggccagacaattgcttattggcaatgctgcagatgtggatcaatgtcaggtaaagggttggatttaatgacctctaaagttacttccaactctgagagtctttatttccttcctgcacagatagttggggtcagaggtgagggacattggcagatagcactggaaaaaaaactgataatagatgcaatccagcacatccagactgcagaatcaccccatttcccaatactgtgtagtcttgaagctaagtgtctcagaagtcaggaataagaatggtgccatatgagactgtagacacaaaagagtggatatttcagttcatccagagaaagtgtgggaagtgggtggctggtggaagccaaggattgaaggggctgttaaatgacctgggcatcctaaagtgtgtatggatggctcctcaagaggcagttcccagaggaatttgtcataaattctgggagctagagccaaccctagagagcaaatcttgggttgtggttgggcatggccgggttccatgtggagggctgcagagactgagaggtttatggactagagataactctaggtttagtatggctagagatagacccagctataggagtttggaaggaggctaatctggcagagagaatgtcctgcccaggagcactgataacagacaacaaagggatatctgagcttggggagcttggcaaatgttggaagaatgaagagctctggcacttgagataataacataatgaggtattttggcctcgtggtacaatcatggaatttagtgccagacaggtgtaggttccaggtttccctgaccttgtacaaattacttaacacctccagacttcaatatcctcatctattaaataataataataatactggtaccccataggattgtttgcagcaattgagtgaaataatataagtaaaactttaaaagttatcccagatgtggaatgtcagctgttttgttactgttgttactattattattactaagatgagctggtgatacaacatagtgacaggagatccaggagcaagacgattttttggaaatctatattgacagtgtagtatcaggaagtccccagaaagtatggggaatgaggctgtgatcaagccagggacccagctcctgctattatagttgagcctaagctactatagacatgcaggtcttgtcacaaataaaagttcttttatttgttcatcattgtgtagcttacaaaacctgttaataatggctaacattttctgagcacatactgtatcccaggcactgttctatgcactttacatggaatacttcatttggtcttcacaacagccaagtgaaatatataatagttgacatatcttttttttgtatggaaaaaactgaggtttagaaaagtggaagaattggcctacagtcacttatcttgtaattggtggaagcaggatatgaatgaggtatctgattttatatcctaaatgctttctaagatgctatttgatcctcacaataactctgaaagtggaaaatgtattgtcttagtcttagtctgttttgtgttgctataacagaatacccgagactgggtaatttataaaaagaaaaaaaaagaggtttagttaacttatggttctgcaggatgtgaaactcaacactgagcagccacatctggaagcttctggaaagtcaggcctactacagacatatgcccagatcccagagacatggtgcttgtgatatgcaaacatcatgactataagatcctaagcccatctttccctgaaaaggcaaagtttcattcacaagtttgacgcccagtgttctggctgtactcccattgaaaccagcatctccaaagatgcatgacatcagcccagaaaccacctgaatattcatcaaaagaaaaggtctgctgagagccttgtgctgcatcaaaacatggcagagaaatgggaggggaaccagatgcatgcaaaaaaggcaaaacacaataggcaaccttgctttataagaatctgctctcatgggaactaattcattcctacaagaagtaacccagtctagcaagaaagacattaattcatcttaatgatgtaatcaccccttaaagggaccacctcccaacaccatcacatttgggaccaagcttcaacatgagtttttatggggacatactatatatattcaaaccatagcatgtaccaatatgtctatttcacagttgaacataggttaggctcagagaagcttagtgactggcacaacgtcactcagtaagaaagtggcaccattagggattagagttcatgctttctgattccctttaggggttctctgtgaagacatcatgctttttttgtgcagggctgagctgaatgaaatcaggccagtcactctgagagctgggcatataattacgatactcctaaccttccagctctgccagtctgcactaattcttcattctctcttaccctgattctgtgcttgggaacgtgcaggtggagtgccaagccattctatagcacttgcttcaggaatgtagagaacctggagaagtctcttcttgccagggtaacacttgacatttctccaagttgccaactagtgggctcaggggtctcacatgaggaaatgagtatccctatccaggtgtgcatgtgattctgctgtactagctctttccacctccacttctccattttaaatctcactctaggtggaagaaatgataactttatagcaaacagatatgtttcaggaagcaggtggcaagaggtcagcattgagagcttcaacttctgcctctgaatcagtgacttgattttgaatgtccagcccaagtttgctgtaattgacaaatttgcaaatggcagtgaataagagctggagctctggagagagactatttattgattcatatactatctgaatgacctaatgattatacactacaattgtatacaactttgatgaccctgagtatgttgtttaattagatttggggagaattaaataatttgtaaactacatagcacagtaggcctcaacctatgtgagatttttctcaccgttctctctcttgtcatccccacctacgcacaaactttttgacttctaatccagcactatatgtatttctgtctctttctttctgttctctgaaaagggtttttttcttggaatactctggactgtgttcccttgtatttccccttcctcacgggatatagcagttgaggggcctctcttggagcaggagtgattgggcagggtctccagcatgcccactatgatgtgtaggtaatttcagtttccactttttccttggtgtccctgagagatgcccatttgtattttcacagagtgcaagaaggcattggaagtaatagaatcttctaaagtttgggccaagatggctttcttggaatgatttcctagcagaatacttcattcccccgggcctgttagctatttcagggacattttaagtggctattaacaaaatgttgaattatggctgcaaactcctgggagctcaagtgacattcacatgaatcacaggtgagctctgtgcagtcaaggctgccacaatgggctgagattaaacaaacaggggccattgttccccccagagcaatgaggcaagaacaccatttcttggaggctatgatttcaggcaatgtgccccttacatgcagaacactgtttcaggcaggacacatagctcattgctgcagggcagacagatgctctctggtttgcagagaggcgtatttcagttttatgtctgcaagaatttaccaacgcttagcatgtccaggaatctaccagccaatctccagggttatgagttgcccagcacatggatttaacaaacatttactgatgttccctatgttctagacattgtgctaggctcgagagaagtggaaaagaataatacccagtctagacattcaaggagctcgtggtttagtggggaagctaaacagtaaataaaagattactttacacaaaataaccaaagtttgcccaaggtccagaggtaacacatggtaggctctgaaaattttccaaaaggagataatagctaaattttattctttttttaaaaaagaattggaaacaatttcaaacatataggtgttgcaaaactagtttgaagaattcctgtgtatccctcacccagaagttcaacagtggtccactaaggtccttcatggctaaaggagtccatccaggaccactccttattcccagttgtcaaggttccccttactctgtctttattcttacaatgtttctgttttaccttgattttcatgtactggattttttttttttaataattcaaggccagtcatcttgcacaatgatcttcaattttggtttgttcaatgtttcctcttgaagacaccagatatgattttttggctggaatttcacaaaactgatgcagaattctcatcatagcctatctggaggcatgcaatatctatttgtcctaatactgatagtgttttatcacttgatgaaggtgtctcttctggggagatactttgagactatgtaaaattccatttcttattactgtctcaccctctggttttatcatccattgatttctcttgcttgaattattacaatgaaccttgccaaatgatggtttttgaattccatcatcctttctacatttattagttggttttctgaaatacagaagagctttctcttttttctctttatttatttacattggtgtagactcatagatttctattttattcaataggttacagtctgataatattgtttattttgaaactcaaattttcccacatttgggaaccccttccagctgactttgtgtgcttttgacatttccctgtattttttgaaagttttttttctttcttgtgcagctagatgttcaggttcattttcttcatttccttcctcagccctttaatcagccagttctctaacaaatcttggttcatttgaacaggaaatgctatttagaaccaagatctgagttgtaggtatgctcagtactactagggtgtagctgcttccagaccttctcagtggacagagctaggatagttacatctacatttacacgtacatctcaaaccaggaatttacacagatgccgcttattccagtctaacagcacagggttcactctggcttttcctccttccatattggtccccgctttctctagcagtaggaaacctgtgtcgtgttaccctcaggttatttacttacactcaattctcttgaatggcgcccgtcttcctatcccactgggcttctgttccgcttggatgccctcttctccttcgctctggtgccctccttgtgtgcactctggctgctaccagcctgcccttcattcatattcaaatttccccaattgtccccaaaacttgtttacagttttctaacttttaaaattcaagacccattgaagatacaatcaagattcatgtgttgcatttggttattttgtctcttttaatgaaaaagctcacccccccaatccacatcacacacagagttttaaaaatagctttgttgaaatgtaattctcattccatacaattcacccatataaagtgtacaattcaatggtattaagtgcattcaaggcattctgaatttttgaacatttttattacctcagaaagaaaccccgtacccattatcaatcaccctgcttccccaatttccatcaatccccccccctccagttctaggtgatcattaatctattttctgtctctatagattttcccattctggatattttgtataaatgcagtcatgtagtatgtgcattttgtgatagatttcttccattgagtacaatgttttcaaggttt

SEQ ID NO: 205 - DNA, 2105 bp, Homo sapiens
tgaggctcggcttcctgctgatggtcagggttttggcaactccccggtgtgagaggggtagggagtgctcccggcggcgacggggccgagttcaccagccgccggggcagtagtcgaaggcccggcgcggcatgtcctgggtgccgcggtgcgggcagtgaacgcgcgccgggcgggatgggccggcgccgggcgccagagctgtaccgggctccgttcccgttgtacgcgcttcaggtcgaccccagcactgggctgctcatcgctgcgggcggaggaggcgccgccaagacaggcataaagaatggcgtgcactttctgcagctagagctgattaatgggcgcttgagtgcctccttgctgcactcccatgacacagagacacgggccaccatgaacttggcactggctggtgacatccttgctgcagggcaggatgcccactgtcagctcctgcgcttccaggcacatcaacagcagggcaacaaggcagagaaggccggttccaaggagcaggggcctcgacaaaggaagggagcagccccagcagagaagaaatgtggagcggaaacccagcacgaggggctagaactcagggtagagaatttgcaggcggtgcagacagactttagctccgatccactgcagaaagttgtgtgcttcaaccacgataataccctgcttgccactggaggaacagatggctacgtccgtgtctggaaggtgcccagcctggagaaggttctggagttcaaagcccacgaaggggagattgaagacctggctttagggcctgatggcaagttggtaaccgtgggccgggaccttaaggcctctgtgtggcagaaggatcagctggtgacacagctgcactggcaagaaaatggacccaccttttccagcacaccttaccgctaccaggcctgcaggtttgggcaggttccagaccagcctgctggcctgcgactcttcacagtgcaaattccccacaagcgcctgcgccagccccctccctgctacctcacagcctgggatggctccaacttcttgcccttcggaccaagtcctgtggccatgaagtcgtctcctgcctcgatgtcagtgaatccggcaccttcctaggcctgggcacagtcactggctctgttgccatctacatagctttctctctccagtgcctctactacgtgagggaggcccatggcattgtggtgacggatgtggcctttctacctgagaagggtcgtggtccagagctccttgggtcccatgaaactgccctgttctctgtggctgtggacagtcgttgccagctgcatctgttgccctcacggcggagtgttcctgtgtggctcctgctcctgctgtgtgtcgggcttattattgtgaccatcctgctgctccagagtgcctttccaggtttcctttagcttccctgcttcctgggaatcaggagcctggacactgccatctctagagcagagtggaggcctggactccctttgctcactccattcgggtccacagctgaggttgcctctgacaagatgaatgggcactgcctgcccttctagtgaaaaggcttggctatggccctgtgtgactccaggtcccaggaaccttgccttcgtcatctgtggatccatccagaacagcggtatctgaagcccaggccatactccctgcctcctttcttctgcctaccagaggctccagagttgagcttgtccttatctagaaacatgtgaagatgcccaagagcctggaggcactgctgtccttcctgcagaaacagtttctcctcctcccctcagccttgtggccagttcctcttcacatgaagcccctggcatttgctggggaagggactggcctggtacttgctgttagggcaggaaggggcaaaaggaagacttgggtagtaatctgggggttcagatgggtagcactaagccagctggcctaaagatgcaataagttcctaggtagtctacccttaccttgaggaatgggaaaatgaacctcagcccattaggcaggaaaagttgatatttaataaacaaggaaagagtgaactgagaccccaaaaaaaaaaaaaaaaaaaa

SEQ ID NO: 206 - DNA, 486 bp, Homo sapiens
ttcagagacaatttttattttaaagaaaaagtaacttatatatttttaaaatctagagaatgtacaactcctctgccacaacgtgagggagagaagtctgcagacggctgactggtgacgactgaacaagacggaaaggcaagtcgctatgcccgaagcctttgaagggagccagcagggtccatgggaggttcaggacacatatctgcagccctgcttctggccccacccttggggaagccttttgcaggtgatcctgggcctctgctggggaaggccccaagaggtgaagcatcctggagtgaaaagcagttgagtagaaacagagagtggtctgtaatttccttctggaaggaatatccactccatatggcctgaagcaagaatttcaaactcctctgtctggaccacatcagggactcccttcccctctggtctctggttgggtgtggccaatgagggaaggaaatggagtgagggtagact

SEQ ID NO: 207 - DNA, 351 bp, Homo sapiens
ttttctggcagcataatttattcataacctactactccccaggaagggaagacagatggtttatctatttccaagttggaggttggaaaactaagatcaataggcatgatcccatggcaaacgctgctgtctggctgtgctccaaatcgctctccgcctttgtcctcctcccactcctggaaccacctttgtccagatttcttgtagactaaataaaatcctttttattgacctatcctctgttacttgtagccaaacacattcctttgaatttagttgcagtaaatagagcagcacagataatatctgaaaatacagaatggctgagttgaggtggcagggcagagagca

SEQ ID NO: 208 - DNA, 459 bp, Homo sapiens
catacttttattcaagattcgtcttcccatgagacactctgggctgtcaggctgtaattagactttctcccaggctgtgtggagtgagagacagagccagattagccccctgtaaacaaatttggtcagttctctcctcaccagccttgttctggttgagcggatttcagcagctcctgggtgaatgttaatgccccccacgtacacagttgcaagaaaaacaataactgtgcatttgtgcctccatttcttgagaacgctctgggtttcacttttcacaggtctttgtgatgtagcactaggcagtggggggtggcatggcagggaagcagtgcaaagagactggaaaaaccttaaggcaggaggtagggcacctgggtttcaaggcaagctcagccactaattgtctttgtaaccttgcaaaagtcactttagctctctgagccttgggtatctcgc

SEQ ID NO: 209 - DNA, 450 bp, Homo sapiens
ctctcaagcgtttcagggagttctctagggagacagggcattgcacaattcctatcaactgagacagaagagctacaagagaggtacagatacagtctagggcggctgaggcagcatgggggtttcatggaggctttggcatctgggccatgtcattcttcagggacaggcaggttgagagcaggtggatatgggagagagaagggcaaagggccttttaggtagatggaactatctgactaaagacagataaaaggcttggagaatgcaagatgtctatagccaaccgcacctgcaagggaagagtggaaaatgaagaaggcaaggctagggtcaggctgtgggaacgcctgaaacaacagggtaagaagtttggtgccgctacgtgattgcaaaaaagcaaacatgtgctggctggtctcagtaggcctccgggagcggtaatcattg

SEQ ID NO: 210 - DNA, 482 bp, Homo sapiens
  misc_feature (419)..(419): n is a, c, g or t.
  misc_feature (477)..(477): n is a, c, g or t.
ttgaggccacagcgattttatttggagaatgaagggcagaaccacagagatctcaggagggagggcaaaggtaactcatcgtcatccacagagaggggactcaggattacgctgtgcgtccaggccatcttccctcccagcccagccttggcacaagtcggccccaggatcatcatgtgatagagcctgaagcctgtctccccaagtccctggaaagtagacatctgtgacaatcctcccgaatcccagggcacagggagcatggctgagcacgccagactgcctgggctcaaattctgtcctgccatgaactgcctgggtgtctttggacaagtcatttgacagctctgagcctccgccttctcatctgaggacaacaggaataatgagggtacccacctcatggggatgtgatgagngctaaagaagaaaatgcatgcaaagttttagcacagtacctggcagtgagtatatgtngcata

SEQ ID NO: 211 - DNA, 344 bp, Homo sapiens
ttttttttttttttttcaatgagaaagtaggtttattttcctttaataaaattgtgctcctgggttcaaaatgccaggttacatacgctgccactcatttctacagagctatgctgtctccgcgcagacattctcatagacttgaaaacgtaaagtggccacaccacgtcaaacgtccctggcaaggttctgcttatcattagcaccacagatgtaaacattacgtcgacaaaacaatcggtgaatgtgatacacagtcctcatgtgtttaaatattagtgaaatctgataagtattacgattttaaaaacgtattttcttaattccaatttccaaattgatgt

SEQ ID NO: 212 - DNA, 348 bp, Homo sapiens
tttatatccctaaaaaggaaagatattctttttatttccataaatgttttttaacaagacacttcagttaaattccaaatgtcagcaaggagtagcaaaggctcatagctatatactttacaaaataaggcactgcgattgtctgtagttttgtatattttactgaagagcattagtactttctttgattctgcctcagtcgtcaagtggtataatactcacgaacagcttgaaccataaacacaaggaaattccaggtggattcaataccttttcaagagcagccattaactcagagcagtgttaaaatgaagattatcaatttctagctgaatcacttcaatacgg

SEQ ID NO: 213 - DNA, 467 bp, Homo sapiens
tttccaagagaacatagatttatttggaacccagagttgctcgactgaaggcacattgggatcacccccagagatggcatgaaaggggcgagagagtggggatggccacagcaggaacgtggcacggagatgacagggctgatgacgggaagctcaggaaggggcagtgtgaagggagggaggaaactcgggaggctgtggggtcctcctgacgtaaactctccagtcatcttctttctttttatttaacctgggatgtgtattaaacgtgtagactcctgggcatcgtcagaaaatctgggagcgggacttggagatctatgtcttaacgtgctcttgggtgattttttgtaatgcaagttaatgagagcatggggactgcatctaccttgttcacatgtgtatcccagaaacctagcctagtccggggcagggttgaggaactcagtatatcttgatgggtgaat

SEQ ID NO: 214 - DNA, 257 bp, Homo sapiens
ttgacggactctttttaatctatacagtgatccttaatctttggggaaggggacaggtcacacacagactactttggagaatacatgaaagctataggtgacttcatcccacctccaaaatacatgcacatatgtctcaactttcacatacagtttcggggggttcacaggtttttaaaaaatccagtaaagaactcatgcacttgtgcttttccttgccactgtcttttcagtaaagagaacatccagccagcccc

SEQ ID NO: 215 - DNA, 319 bp, Homo sapiens
tttttcagtcagcacaaactagtttatttggcaattcataaagatagggactcttcagaggaggttgagagcattgtagggttatgtaaagacttccagaagctgtaaagacttccagaagcaagaagattcaaccatctaaaacgccatgcaggaaaatagccaaaccttctccatttaagtagagaataaatcttagtagcgttctctgcagaatataacaacgctgcaaaaaggccatttcacaggaatataatcaaaactgcagattctcagggtttcccgtaagacgacttctctgctcttctgtttgtggttt

SEQ ID NO: 216 - DNA, 484 bp, Homo sapiens
tttttttgcatagttgtcactttattatattattttccttctgtgacctttccaagtctgaaacagtcccagggacttcttttggttagttatttgcaatcaccgaattgatccagtcgatgtaattggagacccgcgtgaagacggagggcttgtggtagtagttgcagccgaggcgagacccgaagctgacgatgccgtgcacctgccaccggccgtcagacgcctgacagttcagtggcccgccagagtctccgttgcagctggagatcacgccatcacccccagcacagatcatactggttttcacgctgctgccccaccaggcagagctggagcaggtggcatagtccacaaccagcaaccggccctgctgcaggacatcaggaacagccccgttggtctgcagccttccccagcccgtgacgtagcaggggtagttgttgggtagaatggtgccggcagaggggaggcaggccagctg

SEQ ID NO: 217 - DNA, 457 bp, Homo sapiens
gcctgccttcccgtggtttaagacaaaaacacataaacaagttcagacaactgattgtatgattctgggaattctttgctttcctttccttctccctcggcaccacctcctctccccaggcctccctgtcgggcatggggaggaggttggagctcagcatcttgaggaatgtgtcaagacagcccctccgctccgcgctgcacggccagccgcctttgtccgggaggacagacagaaacgcagcaaggcacacaccaaggctgccggggaggcccgggcaccggacagatgcctgttgggaagccaggagctgccgagccacggaccacctaacagcctctccgcccggaacgtgacatagagagtgttggcattaactcggggggtgtccgatttcacttcagacaccaagtttttctttgtttgtttaaacatggaattcagacttcattgtaca

SEQ ID NO: 218 - DNA, 489 bp, Homo sapiens
  misc_feature (445)..(445): n is a, c, g or t.
tttgaacttggagcaaagctttaatagcaggcactggacaaacccaggaggcctcctcagtgaggggctgcagaaagtagatacagaaagacaacaggtcatggaccagtgcccagacggacactcggggcgtggcagtagcatgctgggagctggagctgatggctgtgcactgaccctcgaggtggggctgtcacaggcagaaaggggcctcagtgtgtggagagatggacctgctcacagaagaccacctctccaacctggacttcctccacgatggcacacctggtggctggtcactgtggcttcccgggtgggctgcgaggccagggacaaggagtactgagtggccagcctgcagggagaggagcacccatcgacccagggatgccagccagcccaggcccctgcaagcactgctggggagaagcaggccctggcaganggaggttcccctaaattggtgaaaaatcacagttgggaatgcac

SEQ ID NO: 219 - DNA, 358 bp, Homo sapiens
ttttttttttttttttgatggacaaactgcgtcttagtttattcagacagaagaacactgctcacaattaaaaacgaaggaacagacagcaaggagctacggacacacacaacagcacggatgaagctctaagtcataggatgaagaagccagacatcaaaggctccaactgcaggattctgactcctcgaaggtcgtgagccggagaggtcaatccacggtccttaagtcagagccacatatggtgagatgcatgctcttcagtggagacccagcccctagaaggtccctccagcccttcctgtcggcgtccctccccatctgtggctctgacttaagcaccggagaggtcaatcca

SEQ ID NO: 220 - DNA, 530 bp, Homo sapiens
  misc_feature (530)..(530): n is a, c, g or t.
ttcttctcctatttgttacttctcctaagttgtcttccttcttgtgtgttgtgtgtgtttcaccatgcttcctctttttttcttctgctttcccagaagatcttgccagtagaaattaataaggactgtgtactttcagtcattacaattatgtattcagccagtacatttatctggtacaaaaatgaagctctattgcatcacatactctcagcttctttttgtgaatttagattttataaaaaatacattccaaagaggtaatactaagaactgatgatttttttttcttccccctaggagacttctcagttggggtcatactactttctgtctcagcccattttctgctgctataacagaatacaacagactgggtaatttataaagaaaataaatttatttctcacagttgtggagcgtgggaagtcaaagagcacggtgcatgcatatggggagggtcactcatggtgaaaggccaagacagcatgagagacagagaggcaagatgggagccacttcgtgccgan

SEQ ID NO: 221 - DNA, 31737 bp, Homo sapiens
gatctgttgcttctgcacacagcgtcttcttccacacgcttctgaagacagcgttgttttttctttgggaagtctccatttttgagttaagaggcaatcagttcatgccctctttggtttctgctactctatatgaaaaaggaaggatctattgctggcagtgggctttaggttctgcttgcagcagcccgggggacccttcccagagacctctgcccagtgaagatgggatttctgacttccccttggaaatgagttccggtgtacatcagtgtggagtgcatctgggtttcccttaagaagagaccttagcagaaacttgagcatgaaattaagagaaagggcagggctggcaaagggtaaaatgcatctaattgtgggtgtggccttctcaaaggagagctgtacaagagctttgatagcagtcaaatactcaatttcggcaactctcaaattgaaactccaagagttgttaaaaagccctgtgttgggtgaagcaccttggtgactccagcactgagcaggcagaggtaggaaggtctccatttagtgagagttcctggccacttagggttacatagtgagaccctgtctctaaagcaaaagaaaaacaaagactaaagaactgtctgtttcagtaaatgggattatagtgtgaggtggttcacaggttcctgggacaggattaaaatctaatgacacaagaccatgggtcaaggggttaagatagtgtccctattgtggatggggtttctgttgtttcccgctgggaagggagaggccagggtttggccttgttctgatctgacttgacttcattctgtgtgaaagcaatgctgtgtcagcaacactcacacccatgcgagttgtgctagaattctcaagactcgcaggtgttggagactttgggcagatagatgtgaaggccctttgccctccttgtggctttctaaattctccttacctctctagcctctgggtcctgtccctccgtggcttcaggactcagttgtcagcccaggaaagcctgtgagctctgcaagtggactgttctgtcaggactgattggagattgacttccttacaagaaggtgggcgggactctcaggcttaggtgtgtctgtggggattgtgtaggctgtatattgacataagagattaagttgccctgggactttctatttgagagctattttggaagaacaaaccaaattaaaccaaaccaaacaaaacaaaaccaaacaaaacaacccctaataatagtaattataattcctttccctcgctaagttatatctctgtctaaaggcagcttgcaagcaagaccctttgtgtgaacggacaagagctgcccgggcaggcagactacgggtcaggtcttacggcatttccctatttgctgcttgtattgctctcaaaagcacttacatttttctttgcttatgtcacagcttttttatcagtagtttccttaaaacacacacacacacacacacacacacacacacacaaaacccaaacccaaaacctattaaattcttgctatctcttttcagagagattaggaaacttcaaagctcccttacagtgtggaacaccaagcaagcgtctgcccttgccaataggacgcacaacctgcctctgggctcctatctgtttttctctgacgaacagccatttacatgtggacagatgagaagggtgaggcccacaggaagtcacgcaaacatgccgccttgcaaaaacctcctagtaaccctgggcagagtgaaaagcccctcctttatctcagatgcatgatggaacccaatcctggcgaggggagcgccaccagccaggccttgcatggagagtcctgcctagcacccgcggaggttcctttctgtgagaaagattgggttgccagaggaaatgcttgtctagcctcctgggtaacacacagcctgcatcccttgcctgctgctggcctaagccggaagtccaaggggaaaccttttccaagtctgtctgccaggacacagggtgtacagcgacatcccaatacttgaaaaaacagcatagagcagccattgtgatgtaaaaccagcctgggcagagcggaggagggcacattactggacccatctggccgattctgctccaggcttgaagcagataataactgctgtagcttttgctgttggtcagtagcatgaaccctgttctctcccacccttcccctgcccctgtcggccatttttagtctcccagacgcagtggattcattcattaccatctttttttttcccagcggatggatggtctggagagctatcagccaccagggcaggaagtgcccaaagaattcaggtcctcacatttgccaacgctccatctaacctagatggcagttcagcaaagggatttggctcttctgccaaacttgcctctcaaaatcacccttcggcctcataacacagaataaggccactgtctagatgtccccctgaggccttccattcaagaccagaatttctgacattctgaatcataccttccccaaagaaggcttcatttctcccttcatgcctgtggagaacgtggggcttgccaatagtcaattgttctgacccagcaggaccagtcaatgccaagataactattctgtggggctctcatcaattactttttcttttctaggctggacactccttgtggagcaaggctggaggctgactcatgcacagtgaataccctggcagggaaaactctagagcactaaattaaaaaaaaaaaatagtattctctcactaccaccaacttaaacagagagctgcagcaagggctgatttgaatgcctgttatttcctgtcagcttgcgatgagctttccgggacacaaagacacacagagttccattgtcctgatcatttctctggcccaagggaagggaaagggaacaagccattgggtgcaccactctatgggacaaacagaactgaaacgcttactatcatggcctgggccaaactgactcctttttatttattcgagaagcatggcttcaaaataagaaatgagggtagacctgctaacagtgggcctaaggtgagtcttcacagcttgaaggcaagaatgttgcctgcttagctgtccaacactcaagaaaagcatctcctaagacattaatttggggctgcaaacttggggaaatacagagaggaaacgcatagcttactagttgtactagggtgtcttagtttgggttttaccgctgtgaacagacaccatgaccaagtcaactcctttaaagaacatttaattgggtctggcttacaggttcagaagtttagtccactatcatcaaggcaggaacatggcaacatccaggcaggcatgatgctagaggagctgagagttctacatctttatcagaaggctgccagcagaatatttgcttccaggaagacaggatgctggtctcaaagcctacacccacagtgacacactccaacaatgccacacctcctaatagtgccactccctaggccgagcatatacaaaccatcacaatggaccacataggctattcttggttttcattattaacctaattccctttatccttgagatgtagatgtggtcaacttggcaggattcagaatcccctgggaacaagccctgggcaggtctgagagggagtttctagattcatttgattgaacagggaagagtcagcaactgtgggcaataccatcccttaggctggggtcctgagctgagcagtgagcagcaccatcccttaggggtcctgagctgagggccagcagttacctctctgcttcctgttagcagataaaatgtgaccagctgcctcaggttctgtcaccaagatttcccttcaacctgagccaaaacaaactcttccttctctgagctgctttggccagatattgtattataactctatcataattttagtttttgctaaaaaattcttccattttttttttaaacaaaaatatatcagacactcacacatgcagctcaacatccagcttttcttagtgtctgatccttagtcccgggtgatttcccagcacgggtggatggtgccttggctctcctcctggctgtggacgcccttccctacacagcttcctagctcccagtctcaccatccacctcatcctctctccccagccagcacacactttctgaaacagagaccagctcgtgtcacatttccgcctaccttcttgagtggcatccgggagaccatgtaaatccctctgcatcgcatacagaagctaacctcagacttcctgacctcttctctccctcccaagacagctttcctagtgccagctacttccaccatatcccctgcacaccttctccttggcaatgattggctccttaaaatcagccagtggcttccttcagccacaggtcttcagccatataaaccacgttgcctaaaacatttcttcccagggtgaccttgaaaaaaaacaggaatacacacacacacacacacacacacacacacacacacacacagagagagagagagagagagagagagagagagagagagaggcgggaggggggctctgtcacgcctgacatccccacccaagcagaagccagtggccacagcactgctatcaccaaccatgtggtgtgtgttctggtctgctgacacagttttagaggtgagccccatatatatttctccctcttcctagagtgtgggctctggcagggttcgaacccagttttattcatttctatgttctcagtatctggctgtggttgttttaagacagggtctcaccatgcgacctaggctggcttggaactcataatctgcctacttcaacctctggcgtgctgagattacaggtttgtgacgcaaaagaaaagattggtgcacatgactgttctaatgaaagggggaggaatcaaggaattaaaatgagatctttttcttttttttttttttctttctgtcctttcagttcagtgtaatctaggctagggagatggctttgtaggtgaggtagctttataagcatgaagaccagagttcagctcctcaggacctgcgtaaaagccatgtgggcatgacaaccaggttgtgatcttaggatgtgggagaatgtgacaggggatccctggaaaaaaccggctagtcagacaagccaaaacatggcgctccaggccgagtgagacacctatgttaatatacacgatgggaagcctttgagtaagacactcaacatcaacctcaggcctccaaatgtgaacatgcatgcacaccatacactgcatatcacacacacacacacacacacacacacgtaaacatgtgcacacactcacacacagcatccacacatagacacacacacatgcaaacacacacagacccacacacatacttaaatacacacatacacacacatactcacacacacaacatgcacacacacatgtacacacactcacacacacctacacaattacacatatacttacatacatacatacactctcacacagcatgcacacacacccacacacatatttacatacacacacatactcacacacacaacacgcacacacaagcacacacacatgtacacacactcacacacacctacacaatcatacatatacttacatatgtacatacacttctcacacacagcatgcacacagacccacacactcacacacatatttatatatacatacacacagcatgcatacacagacacacatatgtacacacacacacacacacacacacacacacattcacccacaagctaaaatggcagtatctaagtacttaagacaaagcaaatgactggtgattcctggattctacactttgaacatcttttcttatcagttgtatctgccctttctctctctccatcactatcagcccaaaccccaaacaaagatcctggaagctgtgtggtacaaagaaaatgtacttaggacattaagctttggttctgtaatctgagcaatggcaccgtaagaaccaaacgttctaagctatggatgaacccagtgtggcttacatgtggtaaaagcagctctgcccactgctgggcttgagaccagagcatagacacccacatgtaatgctagtgtcccaacgctaccctctctgtggacttcaaaccctagctctgctggtgacctcgaggaagaggcttgctttctctgggcttccattcctttccgtgagaggagagacagtggttgcaccccactcaaagcagtcaattacatcaggtgaaaaatccacttaaagacaccgaccaggtcctagcagatgacattctctcatttttctgtctaaatggagtgtccctccagtgtgactccttccttcccatctgtccaaagggaagcaggaagaacaaagcacagaggcacgagaggggcccaaggtgaccttagagccacccagagttagcctggaactcatctgcccaggagctcactggttcacccggcttcacctcccttggtttccgaagcttaaaatagactgaaccggtgtggccacatttcactgtgccactcagagagagcccctagggtgttttcagagctggctctgagctccccaccagccaggctccggccctgagttattcatacacacccaggctccaccgggtctgccaggggaaatgtgttctgagagcttctcagctgggcagatccacaggcacctttgctgctcagtgggctccgatcaatcagccactttagagggcgtgcgtaaggaggggttgtgagaccctcctggcagccggcgtgagtactgcaggtcagtggaaagagtccacaagttcttaacggcagccaagtaaaggctaacgggtaagagtggggtaggcagggttcaaggtctatctatccctcaccccagtgttatgtgatccagactaagtcagctcccctctctgggcttttaagaggcattaagaggcatcctctgcaggctggcttctcctccccattactcactgtggtctcattctcgggccttctgagacgtcaggatggcttcctgcagtgtcaagcgtgctcaaggtcataaccaggagagaaggagaaagttttcccctctcttcctcattgtctttgccatgacgatcactgtcaaactgtgtgctcacttagcatgcgggacatggtgaactggcccccagagtccattctggctttgtccaaggggcttctctgaactgcaaagacaccccagtatcccttagctatctttcctacctgatgcactgactggaggatcagatggcagcagagagaggggagctgtgcttgtggctcatggcggaagtgtctgtctcaacgtcagcggcaacttcagaaccctgggctgcagctcgtgggtaatgtatgtccctgcatatgggcggtgggtgcttatggtacacggtggaggtcagagagcaacctcaggcgttggtccccaggctcttgccatcactggtttgagatgaggtttctcatttgctgtggaactttaccacacaggccaagccagccaagctgcaaggagccccagctcctatcttacccctgctgggattacaggtatacatcactgtgcccagcttctcatgtgtgtcctggagatttgaacacaggtctttatatctaggaagggaacactttactgtgtctctgctctggtcaagaacgttcttgaacgtagtggttccagtgagagccccttactccttactttcttgcttcatctccagaggggagtggacaatttccccagaaatttgttgagaattggctccttgggtccttctggtgacatcatgaacagccaccactctgtgttgagcaccttttcagtgaaaaactgtggaaggatcccctaccctcaaggtgccacatctgcttctgtgactgagcgatgggagaatggagacggggcatctaaaacagcaatgtccactctccattccgcgccagacatcagggcaagcaaccctgggagacgaacaagacggcagaagatgccggccttcctctcagaaccaaataccgtataataggcaattgatggctccacacctggacctcaacttctctgtgtcattccctggctctgaaggtgacagagctcatcttggcccggttgaccctcatgcaaatgatagtgagaagaagacagaggtgccttcaagtgtggactgacttgaggcaagagtgcacgggcctgtgagatggggcccatctgagtctgcactgagctgttctccttcctgtcttgttctcctggtttcttgaaggttttctgtacctgtcccttgcacaccagtccctaccacaatctgcttccaagtcacaggagcattgagacagaaggggctgtctgtagccaggggaaaccccgccctggatggataccggctcaccccaaacatcacattgtcattgctgaggagtttcttacctctgggctgcaattctgaatgcaaaatagataacattctattcaggcttggtgctgcgcatgtgcaatgccagcacataggtactcaggggaggaggaagcgacaggaccaggagctcacggccagcctcagttactcagatccaaacaatgaaaatctaacaccagaaactttggtttcctgtgcttaaaatggggatccttatttgaagactttctcgaaagctagaagaccagagatgtgtagcatggtgattccttgactataaaatgctcaaatcagccatagtgcccagcatttgggagatagaggcaggcaagatctctgggagtttaaggccagcctggtctacacagtgagttccaggatagccagggctacagagtgaagcgttgtctaggaaaacaacaacaacagagcaccaccacaacacagaaaatgctgactggttaccaggggtagcttttctagctccaagggcttaggcacacatttgaggaagagactgctttgcttttattgtattttaattaattaattaatctgagatagtcacacactgcccaggctggccttgaactcattaaatagttgaagaggaatttgaacctctgacccacctgcttctgcctcttgagtgttgggtttatggcaatgagccaacaggctctggttgatgtggtgtgggagactgagcccaggctctgtgcgttttaggatagtgttccaccaactgagctatgtgcctaagcctattttcctttcattaacacaaaattggaaaggatcccccccccccccgagactcacagaggttcttagaggagggggaacagaagggagagaggaattatgtgtgtatggtgggatggcagagaagatgggggctcatcttaactctgccatgttgggccacaggtctctctgacctcattggtttgtccacagaatgattgtcacacgagtccttggagtgcagcagccctcttgaccactgggaaggatgctacacatgtaacagccgtgacttaacaccagggcgacacacatgtataagccgcgagctagtgctcaacccccttggcgctcttgagaggacggtagaagcaacttaatcaagagtctttcgatttcctcactaaacacatgcagctccctgctcagacacaggcagcccaaggccaacctcacaatctccagagcaattcctgggccccgccaagatgaacgctgggaatttccttcttaaaaagcatctcaaccgtccatttcggggggcatcccaccgtctccctcacttatacggggaggagccgttatttgtaaggtggttacattgcaaagaaatctgtttgccaaattggagggttggttaatcatagcccctgacttctcgtaggtggtttcttcaaaggctttcatttgtttgctgcttaatgtagaagaaacctcgtttgtaccgtttcttctcctcccagggaggcccaagctgggtacagctaatggactgtatatcactgactttaatatcgttccaggcaacctgatgcagaggcagatggaggatttgatattatgaaaagcatctactttattgagaatggaggtttaactacttgggtgtccattcagaagacaattaagtccctaaaaggtatttatttctagagggaaggagaaggtgggaaggagggaaggaaagggaaaaggagggggcagacagaagaaacaaaaggaaaggaggaagaaagtgagggaaggaggaggagagggagggagggagtgagggagggagagagggagggagggagggagggagggagggagggagagggaaggagagggagggagagggagggagagggaaggagaggaagaaagggaggaaggggaagggctatactctgactaaatagcctagatatgtctaatataaatatgatgtgacccacctgtacaatttcaaagcttctattattcataataaaaagttaaagaagagaacaaataaagaggaaccaaacagttggctaatttaagctggtgtagcctagtttcacttactatatttgagatgaagctatgtactacgtgaccaacatgaaaaccggagctacggcatgctctccccttcgctgctggaaccgccatagtcctgtctgctgtgggcgtttggagcgagcatatcccaggtcgagctgacttcagtttaaggccaccatattatgaaccacacgactaagtttctgctaagccacatacttaaagttcctaaatgaaaggacactggggacccccaagtgacttctcatacacagtttccttcacccattttactgcctctggagagtgagtagcctttgtcacctgggcaaccctactctcctgtccatgcatggcagctctgctccctggcgtctggttttgcccacatcaccatcaccaacgggcagccctgtctcaagcgcttgtcgcatgcaatctgtgagaccactgctgaggattgacaaaacaaaacaagatctatagagggagggccaacggtaacacacagccgataagtaagcaaaacgagtttgtcagatttgcagtagaggaaggcagaatgacccagagaccgagtactagagagagctgcttagcggcttgtgagccagaactgactggtccgcagaccttgagggagagttcactgtgtctgtagtgagaaggagccactgaggctgtggtggagagatgacccagcagttaagaccaccactggctggtcccacagaggacccaggctcatttctcagtcctgctcacaaccatctgtatctccaatcccaggaaacctgatggccccttctggcctctatgagcatgggcacatacatgatgcacagacatacatgcaggggaagtacccataaccataacaaaataaattgaataaatacaaagagccactgaacctggagtccagagacaatgaagaagacaagaaaagaagaccggaagacagtaacagagagctgctgctctggttttgtcccccgggatgggacaacaggcctggtcttcctgctcacagggatcctcaacctctgatccccccactcccagccctgccttgattccatttcttgacttctaatttcccacccctaccatcccatccgtaagatcccaacagtaactggggctccttttcccaacccattcccagcaccccctgaataaaccttaaagcctcggggcctctgtcaccctcctcacccagaccccagtccttgtaattcttaattaattcttaattaattactctctttcaatcactctcacatttgttttatttatttcaggagttttggctggaatgattgctataatgtgtactatttagtaatatgtatctcctctttcaatagccattaaaataactaaaataaaaatatcagtttatattttatagccccatgagcaatcctatagatttactcatatttaattggtgcgtgctgactctgcattgcttgcatttctggtttttatttcacttcgtctgccactgacagctgctctgtagactagggcaggcattgcatgctggcagctcactgctttgccaaggtcgagaatgtacacaggtctaaacattaatgtggcgaaatagagaagtaatctatacatttaaataatgaatcaatggtccacatgatttttcttcaaaattatggcgatcctgttcagttaacttattttgtttcgtgcaatgatatttatttatttggagtaatctgccaagttgcttaagtttttctttgcccttgaaattaaaagttttcattagggcaaatccattggcctatttaataaaatccacttcgtacttaatggtcccgtggtgcttcgagaggccttccatggcctcatatatttgaacatttggttattagttggtagaactgttcagtatttattaggaggtgtgactttgttgaagaaggtgtgtcccttgggggtgggctttggagtctcaaaagctcaagccaggcacagtcttgctctctttctgcttccctcttttggttaagatgcgagttctcagctattgctccagcaccatgcctgcctgctgccatgcttcccaccatggtgaatgtgaatgaagacttgaaactggaagccagcccccagttaaatgcttttctttataagttgccttggtcatggggtcttttcacagcagtaggacagtaactaagacaggacatttattcatctcatctatagcggtttaaggaaggaaggagaaagtgaactgagtgggggagcagagagaggggtgctcagcccttctgggatgatgctctgcccacatttaagatgggcctttacacctcacttaacccaccctagacacgttgtcccttacgcaaatgtaaatccatccacttgacaatgaagatgaactattgcattttaagaaagggaagttatgctccccttacgccaaaagccaaaactttgtaacttaagacttgaagctgttcttgtctccaaatggaaagattctgagagaaatggcaggtgacaatggcctcggggagaagggtgtgtcagtgaagagagaggggacatcagcagctcagatgtacttgctggatgaacttggaccttgagagcagcgaggatagaaagtctgtttccctctggctcactggtgcgagccttttgtccttgtctggagtgtccctgttacccttcaccctcacaccacactcagaactgtgtgtggttgcagagataacgtattaggccaccaagcctcagggctcagagcaggaccatcctggctggtttgtacctgagagcatgtcaggagtgcagaagctctgaccccacctagatcccgaatctgctttggaacaggatctttggggatttgggacatgccagagtttgagaagcccttgtctacatcagccattggccaaagctgaaattttaggtgattcctgtgttactagatggtaattacaactttgtgctttttaaaaatagaaatgaaagcacagcacggggttcctgtaaacctgaaggccaagcacacaggcgtttaaagtgcacgatcaaaaagcccagtggcttctcgggactgccggttcctcgggcacactggggtggcctggttctctctgaggccacttgaaacttcctctcagcttctctgcacctggccagcataggatccacctctggatatgttctcaaccgctctacttgaccatagtaatgtcacacagtgtctgagagctttgagcatgccagcaccacttttctgattatccttgcccctgaactgaggggtcatactgtacccactgagcagtcagtgtgctgcttctgtgggtgctctgtgatcctaactttggcctctctttgaaccccagcttctccctgctttgtctctagctatcacttggcaggcattatgtgtatctccggcactggccaccagcccttggtgacacagaagctgagccagagaagctgctgggtgacaactctcaggctgtactgtggcttccaagactccagagtcctcattgatgagctcagctccgtggtcacatggcttggcagaagcaagctcttcttacagcctaacctgttcacccagcttaaatgttcagaagagcaaaataggaagaggttgtgctgaggagacggcttagttagcaaagcgcttaccacagaagcttaaggacacaaggtcagatcttcagtacctgcataaaggacatccccaccccaccccagcaaaggggactcacatgttggtcactgctgagttctgagggacctgtgcatcaacacagccttcagcagagtgggccatctgccaccgccttgtgatgtcagtcttgtggaaaggaagctgtgtctgagtgaatgagaaggaggctgagacaagcgctgggttctagatggcagactcggcaagagactgctgaggcagggctggcccagaggtggaactggcaggcagaactaaagcgttgtcaggtttcccccagaacccttgggacgaacccaagatggccgacagacaagaattcggttggtaaagtgttcgccgtgcaagcctgaggagctgggttcaattcccagaacccacatttaaaaagtcaagttgagaaatgtgtgtttgggaaacaatgacaaacaggtccttggggtttgctggccagtcagcctagcctactctttgaactccatgtatcacaaaaaacaaaatggatgacctgaaggatgacacccatagtttacctctgacctccacacacacacacacacacacacacacacacacacacacacacacacacacaaaaaaaaccactcagtagcctctgaatggaatgggccaccagataagaggcaccatgctgacaggaggtaggaccctagtaactataaaattgcaacaccctcatgttgattacaaactgcatgagactttgagattcacagagccaccctggctctgagggaggaaatgggtcctctcctgaagcctccagtacattaccgagttttagccacaatgttgcaaagcctctctggagactcctgggcgaaagtgagatttgtcactgtggaatgacaaacggactgggataaccagggttggatgacctccaaccgtcaccagggctgcttcccatgaaacctaatccctctccacttaaagggacagaggtgttggtcaacccacaagcccgaggatggggaaggccaccctccctgcaggagggaccttctccgtgaagcccaccagagctgggctatggggctctacgggaaaagtagaaacattctcagcggtattctgatggaaaacagcctcatttcttacggagaactagtccagagaagaattacacttaaaaaaccagatggctcctttgtttccaatggctgcctataaattctctatttttctgttctgtggaactgaaattgattgaaattggcatttttctgtcatgagtcagttgacaagaaaattgagaaaacaaaacaaccactgccaaaaagatttttttcctctctttacttctatccaaacaagtgaacccagacattcagataggaaggaaaagagagagggacagacggagggaggaaaggaggaagggagggagggagagatggagggaggaaaaggaagttagtaatatttcagacgccttcagcacacccctttcccaaggtacaatgtagatctggggacgcacattttatccagctgctacccatctggaatctcggagaacttctgtctggtagcccatgtgaaaaagccaaaaacaaaccaaaccaccttggattttccgcctgatttcgtagacttttccaggaggtagactccagacaggagttgaggcaacttgctgctcttggcttgcaagtgaccgtttagcacgcgggtgtttcagggaaactggtgggcctggagattgattaatctgcatcctgtgcctcctggggctcccaatcagcctcttggctcctggagcctccagcctctggtgtcgcaaggctcacaggggtgagaacgaaagtggcgcaaatgtcaccagtgagcaacacgtcactgcttgggtgtcatctggcttgtccatttacttccaggtctctcttgtgtatgaaactggtgacagtgaccaccacgcttccactggccacaaaatggctcctgtccctggacctaagggtggttgtatgttaggcagctgtgtctggctcctccacaggacccacctgagctactctagccaggtttgaagatggacgtgaacacaaaggactgcaggggacttgcagaaggcacacgtcaactgcatgtggaaaaagacttctgggctcctgatgcagggagtcaacatggcagagtggcctgtgcagcccctgagaagaaacaaggcctaaaggatgttcaatttctcatttctacttttaggaatggatggtattttgttggggccggggagggccagagcagggctgggaatataatgcacagacttcaatacataaatgtgtaaggtctgcctttgtttcgaagtacgaccctgatgaaggaccatggcattttgctcattattaatgtgctttgagaatgagatttcctttggaacaaagtggcaaatgaaaacgagacaggaagtggccctgtagccccagactttgaaaggtgtgtggcttgtggatcagcacaggctgcggctcctcatccggtgtgcagacctacactaacctgacctgttctgactcagcgttcactacctctctgtccccacagcgtttggatggtgaaattataaccatccgtttcctaagttctcgggggacactgtagtgacatcctttctatggagaacaccaaattcagaaggattcagaacaaggagactcttatggagagctaccgtccaccgtaagtaagagccagtcagtggagagtcacaaggtcaactactcaattcagccgagggccatggttgaaagactataacagaggaaaaactcaaacagtggagagaaaactcatggtcccgggcatgcggccatctcctttgtgaagtgtaagcatgaacacagggagtgaggaaaagctgagaagccacaggaattaggcctgcagaactatcgcctggccttcctgacagaaagaagtaggctggtgtatgggagccagccgctaaatgttccctgaaactgcaacacctctgagagtcagtggttaaactgttacaagttagccacggcgaggtatttacatggtagaaatcagttaacactgtgggtcctctcccatctcctggcacacagagagcaggcctgtgaaagtcctgctgacagcacctagctatctgtgagccggcaatggtaactctcaccacacacaaacctgaagctgacggtgaccttaaagtgcctcattgtacaaagcagcagcctctgccaacatcagctccaaagttccaggaacagacttggctctcacctacagctaagcatgctgaaagtctccaagggcttccagggctttgtcagctacatccacacacctgacgcttgcttaggaccacagacagatcttctcacatgcatgcgtgtgtcatatgaatcagatatctcctgaatgactcccctgggcaccgcatttcactgagcagccgttgtcccagggacgggccctctggaatgaagggagcagagacaggaaggactgcagatatctgtcgcccctgcacatgatcatctcttgcagctgttgtaggctgtttcctccaggctgccttgaatgagagcatctgtgatcacccacaggagacactcaccaggaccagcctatcaacattcccttacgggtggagagaggactgctaggctaatgagcctttacagatccccacatgaacccaacccttacccaggtcatgtaagacctaatacgtggactggggattgggaccccaaagagtctttagtgctacatcttttcatgattcatccacgccacagatggggctcttcagcggcatagctattcataagctgcccaagagacttcctgttttagatagggttttcctgctgtgaacagacaccacgaccgaggcaactctctaattggacaacatttcatcgaggctggcttacaggttcacaggttcagtccattatcaccaaggtggaagcagggcagcatccaggcaggcatggtgcaggaggagctgagagttctacatcttcatctggaggctgctaggaaaatactgccttccaggcagctagggtgaaggtcttaaaacccacgcccactgtgacatacctattccaacagggccacaccttctaaaagtgccaccctgggtcaagcataggcaaaccatcacacttcccaaaaggtctaggggcctttgagttacccatgcacccggaagtaactgcacacaagctcaggttcaggcaaagctggacgggatcctttctctggtccgcgcttcctctccgcctagtgctaacagtcttcaccacagccgtttgcatctgctcttcacagctctaacagctctctggctggcctcatctaacacccgtcattaaatattgtacatgatgggggagtattccctgcggtgcttcctcctctgagctgaagagcgggtccacctttctcccacagctaacactaggactccgtggtgtccagacacagggtcagcttagctcaccagtctcccagctacttcctacctctcacccaatgtgaacccactgagtgatctcatctgcatccccaacctgggacttccctcttttgctgccttaaccgcctcccctgatgatttcccttctacttacaggtggaagatgggcccacttcagaagaactggctgttttatctgactagaagattcagcaggggccttataacttccctcttctttctcttcatcccccaccctctagcacacccagttcccagcttccctgactaaagtttccttctcccctagaatgggagaacccgtataccagaacttcagttcagctggtcactgtggcatcctcagccacgcaccgttcccagagcactgacagctcaggaaatattggaggaaatgtgtaaataaaaatcctgttttctagactcatacctgtggttctacttccaggcttcctcctgctaactcggctgccatatctcccgccagctctgagctacctctccacccagcccatcagcaggcacggacagtctgccatcacaccagacctctggtccaaccgtaggctgccaccttcctgcaaatgtcatgggccaactatgaacctcccatgtgaacaaccgcagtcactttctacctgactgtgcgcttccagactaacccttcatgcatgtcctgacccctacacttcacacaccccacacaccctactcagagccaaataccttttaattgattgtatttgtatgtgtttgtttatgtgcactgcacacgtacgaatatgtggacaaacaagccacagttcacatgtagaagtcataggacaagtttgtgggcttggctctggtgattgaagccagatcaccatgcttagcagcaagcccctttaatgactgagctatctcgctggccctagagttatacattaaatattttaaaattatatgtactcgtttattagggaggggagtgtgtgtgtgtcataatgagcatgcggaagtcaagacagcatttaggagttggttcttttgatgtgggtcctgagaattgaactcaggaagcccagcgtggcagaaggcacctttacctcctgagctgtctcgctggctccagtccactgaggacttctgatgtctccacaatgccccaggcctttcactttgaacacactcggtctgttttttctgaagtgtgcattaaaggccgctgagccttgctcagagttttggaataggatatggaacaaaatggggaaaacaacaacaacaacacaacaagatcacactccatgaagcttctcttctgcaacaggaaacaaatagcaagcaaaaccactggtaatcattatgtggtgtctaacagagagcggtgacaggggtggaaaactgaatgacatttaaaaggagctggagatgttggtttaaggcgtgtgggggcagcctacagcatggaattggtccataggatgcaaaaggaagagagcaagccaagtcctgcaggaaggagcgtgtctgtggcagagttcctctcggtgctgtgacctccaggacactcgtgcataggattacaggaatcttgaatacatatgtgattgcgattatgaaagtgaaagtcaagcagggctgtgctttccttttctggggaagacccaggtggggctcctggtgctcctgcctcatgcacagctgtggcttatccacgggcttattttataaggcagcaactgcgacagatctcctgggttcccaccagctctccagagctctgctgggtacacattgagctgaatgctgagctgagcaggatcacagaggcatggccaggctgagttggttctggctcagtcatcttcttacaaccctcactacatgtccatcttccccatccagatacctacccctctgactccagacatggaattaacagtctcacgtagaggtgttatcagattccagagccccgggaaaccaaagccacctccgattgatatttttagacctaaggcagtggtatgggaaggtcgggccaatgggtggcagttgggtcctgagggatccacccttgtgaatggtacaaatgtataggagagaatcaagagactttgttccccttctcactgtgtgaggcacagtgttgtttgacttagaaatgtcccccacaagctcatgagtttgaacacttggtgacattgttcaagacaataacctttggacaacagcctctgcagctgctgacatcatccttcttttgctcccaagccatcagttgacagatgtcctagggtcctactataaggacttgctataggaactttctataaggccttgctataaatacttactacaaggattagctataggactttgctataaggacttgccatggggccttgctataaggactttgctataaggacttgctataggacttgctataaggacttgatatagggatgatgttctattatacttcttatttaggcaatggttcctcctcatgtgatgtatagccagggaccacctttcaactcttgtagtcgctctgggtagaaatctaaccatactgtaacacaaagctctatcctttacccataaaatatgctaatgactacaaaactgtttttatttatactactcaaattacttttggcaatatgcaaatttgataaaaatggaacccaatgatgtgtagattttacttatatcaccttctcccagttcactaagaaaatccccctgttttccttagctcaactaatacaaggacagaaagatactcccttagtggtcaggtgcatgcacccctccaggggatacagggttagcatttggtgttaactctctagcaagaaattgaacctcagggttctttctcctttgggaggagacatctagagtatgcttttaacacaaatgccccgtttcacatcttaactatttcaaagcaagcttgtaagccaaagttctccaggcaattctgcagtgggcaattctgcagtgggcaattctgcagtgggataaacccctcctggtttcagtaaagacgcacgtcccgatgtcggtcattgtctttggtccaccaggctccggcttgctcagctcacctttgcttcctctagtctttgctgggagagccccagtggctggagaacacttgtcccgagcttccccatgcaacatcttggcatcaattgcaatttcttcctaaacaaatttgattgcctgtgcaaacattaaaccaataggtatcgattgatcctctgccacagtccaggggctgactctggccaaggtcatcctccacagaagctcataaatgttgcaccgttgacctgaagcaataaatccaagctcttatctggcttctggaacattttcctgcagatctctcgggggcatcaacgcttcctgtggtgactcctatagttcttgcccctgacgtctttagtttcaactcttccttcccatttttgttcctgcccttataaaatcagaagatttcctggcagcgcctggttttattagctcccagacccctttttcacagaagaatttactgtggcagattccaagggacatctctggaaataccatccttttgaaagtccctgaccttgacatctgttcactggaaatttgcacccgtgtctagaatgcctgtgtaatttatgaagcttacacattcttagctaaatgggcttggatcccagtagccgtgggtctgagccctggttctgtgactgattggcaataccaagagtgcctaagcttcttcacctggacaaaaatgaataaaatctacagagcactctttctaaacacagccacagtgaaaaatgtgtgtgagcacatgtgtgcacgtgtgtgtgtctgtgcacacctgtgcgcgtgcatgcatgcatgtgaatgtgtctctgtacacgtgagtgtgtgcctgtgtgtgaaagtatgtgtgagtgtgtctctgtgcctgtggtgtgactgtgtataaaagtgtgtttgtgggtatgtggctgtgtgtaaaagtgtgtgtgtgtttgtgtgtgtgtgtttctgtgcaagtgtgtgactatgtgtaaaagtgtgcatgtttgtttgtgtgtgtgtgagtgtgtgtctcatcccatagcccttccttacattgtcatattggctttcctttgtcttggcagcaagaagaatgccgagcaacatcagaactctaaaaagcaacccagctgctgcccggctctcagaacacacggcacacggccagcatcctccaacccactttctcttcctgggtaccactgatgtggtttctcaggctgccttgcacttgggtgtggcttatagctttggaagtgagtagaatgcacgtggatggtgtgtgcacggcccaaggggcccactctctgctccccaagcatgttctcctcgtctttctcttccttctccctttctctatatttatttatcttttttaaaaatttattgtgtgtatgggcacatatgcacttgtatgacacacatgcaggtcagaaggcagcttgtgggggttattccctccaccctgcagggtctgtgtcaccttcagatcactgggtttggtggcaaggacatttacccaccgagtatctcgatggctcttttataccacagttcctcctcctctcttggctaggtgcagatgatcatgccacctcagaaaccatgtgttaaggaccctacaaaatggaagaagcctcagccccaaaccactgattggagaagaattaatagtcaccggggaacattgtttggggctttagatcaatgagaaattaatctgtactgcattgagtcattgtacatttaagaggccaaaagctagcgttcctttaaggctccataccatgcaaatctcaactgttttgggtaaacacagcgtgttttgcagacaggcacacaccatgggatccaggccacctgtaagcagctggtcctggctgaagctcagtgcagacccagcagggtttacagacatgcctggaggaacggctcttcgcagattttcctggctcaggaaactaactgaagccaccgccgaagcagcccttctctcgccgcattaaataacgtctattaataaaaacagcgcctttaaatgttttcaccgtggcgaatccaaatgaggaaatcatgttctcccttaagctgtgtctgaatagcattctgaggacacagttaccctaatattctctagtctaaaagaaaccccaccctgggcctaagggtgggtgataaccttcctggtttgcccaagggtccacggactgctaggaggacttccaggctgaccagcataccagagactatgatgttagaagcaggtcggcaaacatgagtgggagctcaaagcagggcaaaggagactggctttgttcttcatcccgacaggaaagacacacataaatgaaatgctatgtgcctctctctctctctctccctctctctctctctctctctctctctctctctctgtgtgtgtgtgtgtgtgttcatgtgtgatgtgtgcatacgtgtaagaagtgtactaaaccatgagtgcatgtctagaagccacacctgtcttcctcaatcgctctccaccttattttttgaaacagggtttctcattgaactgttttggctaaactggttggactcccaacacctggctccagccaacgctgaggctacagacagactgctgatgcagctcttatgtggtcgttgggggttcagaacgcaggccttcctgtctgtgcaacagggactgcacccacagagccatctcctcatttcctggtgtgttctttgaaggtaccaccaaccaggagaatgaatcccagtctcaaagttcaactcaggacctcccaaaggccagtgcagccatgaaagcagttggtactgggccccctgcatcctctcttgtgcagcagggcagcgggtatcagccagtgctaggagggcagagcagaagcctacggaagaggctggtgggggaaggtgtgtgcagatggcacagaggggctgtcaaaggagcaccaggatgggggaggggggaggggccatctgctcttctatgggggtggggggctctcctcactcttgccgtccgtaggggcttactgagattttgaaatgaggaaggagatgggctgaaatcttacagtgccctttcaaggcatgttccctgcctcctgaaggctccgcctcacagaagcaccaagtccttagcacacaggcccttataggccatgtaagatccaaagacagcagcccctctccagggactccttttacctagttccaatgacacctgccttcttgtccttctgctctgagctcgcctcttccaaatctcctataagaccctcttcctcattccagggcttggtgttggcctctcttccctctctccttccctctcgttcccacagctttgggcaggcctcttggaaatgccaccccaccccagctcaagccacgccctccagccatgcgcagatgctccactctcttcactccaaaagcatcccatttcgcgcagcccaaaatgaacgtgtgaccctccccgctgtacacttgatattctctgattttctccaggcttaggcgctgccatccacctcaggcctaaccagaaatcgagggagcaatgactgactctctcctgacacaaggcactttataaactacagatagaggtttcctacgtgcgcggaggaccctcttcctggttaccgactccagcctctcagggttcctgtacagaagggcaaagagcacattcgtgagaactttaccctcgtgatcttgtcatccctgcctgcaccctccataaaagagtgttctacccactaagggaacgtcagcgtctctccgtcctcttgatcttttcttttacactgctacctatttagatgaaagcttctaacgtggattaaacgttgctttgattagaaatttctaaatcaggttttcaatcactgtggcagtggcagaggagtcttgaccttatgtttgattcttgccaaccacggctgtacctgggttctctggtatggtccaagcttgaccttgaagaaaggacagcggaagcctgctgttggtttaatgtcctgtcagagctgtgactgacaatagccgtaagtgtgtctaaacagccttaatattcagcaatgtcaggtgggactcaagggtgctttgtgttctcaggactgatcctgataataatccagcaggcctttttgggggtcatttttattctgaggtctcgttccagatagaaatggtctcattagccaagaaagtgactgtttccaaatacctcagcctttccacctagaaatggtggatttttgaaagaatgccaaagaaccaactgttagccttgttaagacagtaaacacaatggcatctcccgaaaccactgcaagcgtatactttacctcatgcttgtggattttagtagtgttagtttgttgttacacaatcccacattgatccaggctgtgcaaaagacatcagtcgggtttagtgttctaaatagtccaaaagaacatatgcttgggcccagggataggtatccagctacggcacacaagcgtggcgagcccctcagaatcttaatcactgtgcttatcaagaaaatggccacattgcttgttaagggctcgatgacttcatcttccgtttgcagcaacgcctgtgttgttaactccaggaagtgtgtcactggcttttgtttttcttgaggcttcagtattccatacaatagcagagatgggaacatattttattgggaaaaagagtaaaccttttctgcagagcttaaaccaagataggagcaaaataacttcccaaaataactgtcctgtgatggtgaacaggcgcggcatttccaggtcaggggtcacttgtgtttttgagtgaactataaatcgggaactctaacacatgagatggcaggtgcctccactggtcaaatatggaaggagggtctgcccagtgctgactacacagcagcactcaagacaggccctggtggtgcagtaaaaacaggcatcaggcagagagaccctcaggttgtagtagaaaacaaacaaacaaaaaaaagcaggccgtgcttgtacacctctaatcagtgatatacaaacaaacaacgtcccaacctgaggtctcgagagaagcatcggctggaggctggtattctgagaggatcttggtgcccaggtcaacctcagatccaggctgtggtcgtgagccaaggaccaaaggtcctggacacctagcacactgtcccagctgtgttgtgttagccttaactctgcatcaccgctaactccccctcactttctttgctgaaaagtgaatggctcaatttcttgagtatgagaacagcaactccaatgggaaaggggcctaaatgtgatgtgcaagtttacccaggctttctgtgtgctggaataacctttctgacttcctccccagctgcagacttctacccaattacaacaaattaacagttatccaaatttacacccaattttctcactcattaaaagtcacttactattttattacatttatatttattatattttattatatttattattccctgtgtcatcctgactctttatcccaatgaaatatattggcatgttgctattgtatgggatatttaatccataatataaatttccctagaactatgaaacctaacagctgtctaatagtctattatagagatgtactagctgtattcctccttcggcatttacattaatttcattttaatagctcagctctgagaaatgtctgtgtacaatgcgggtaggatgtcacaccacaagaaaggctgtggtgtcctgtgctgagtggtggggtttctgcagagggcactcggaaaaacgaagggcacatccagagggtaagtgtaaaaccagcctgcctgccttcctacctgcctgcctgcctgcctgccttcctacctgcctgcctcccttcctgcctgcccttctttccttccttctttccttccttctttcctcccttcctccctccctccctccctccctccctccctccctccctccctccctcccctccctccctccctccctccctccctccctccctccctccctccctcccccctccccctcccttccttccttcctccctccctccctcacttccttcatcctctctggacaatcagccttggaaaacagtggctgctatgcaagtcactcagcacccagccttcttctcatggaccactgatgttgcctacatgtgcagctcggatcttcctaggaggcctggcagatgctcggtgtccaagactacagcaaaatgacagcaggaggggagcttgctgagcacacatcccttatttagtggtacacataaaattatccagtctccttctaagtgtgccacttgctgacaagaaatgcattcactatatgtcactgttccctgcccctggagatgtcttgttagcctaaatgaaaactctggctttcctgatggtctagtggttagggtgtgcagctctctaattaaaattgtgttccttaaatgctaattccatctccccctttcctcagccttgatagtccccatctttctttctgtcctacgaagctgccttatcctagcacctcaagagaggactcataatctgtccctctgtgtctggctgctttcacttgagtcttaaggatgaatggtttcggcatgtgctagaatgcccaccctatgaaggttgaccagtaggtcagtgtatggatctcccgcagtctactttcacctccagcagggaaataactggtagtagaatcctgcctggtcgcaattcttgtcaactcagcacaaatctagccatatctgggaagaggggacctcagctgagggcctgcccccatcaaagtggcctgtagacatgtctgtggggcattttcttaagtgctaattgatgagggaggaaaccccactatgagcagcccaacccccacaggtgggtctggtaggaaaggcagctgagcaagccagaggaagccagccaggcagaaagcagcatgccccatagtctctgcttcagttcctgccttggttccctcagtgaaaaactaacctgtaaggcactcgaggccttttctctctcgaggggcttcaggtcttggtgtttctcacaggaatgggaaaacatctgcaccatgtatcgtatgagaattctgggtctagttttgaagaaattgtcacacttccacacaatggctcccattgcttatttcctccctccttccctccctccctcctttctcccttctttcctcctccctttctcttttccttccttccttccttccttcctccctgccccctccttccctacctccctccctccttccctcctctccccttcctcctcttccttccttccttccttccttccttccttccttccttccttccttcctttcttccttcctccctgccccctccttccctacctccctccatccttccctcctctccccttcctcctcttccttccttccttccttccttccttccttccttccttccttccttccttccttccagggatccagttcctatcccctttgagagaacattatcacaccagccatcaccatggctatgaagatgtacctccctgtgatcttccatggctatgaaggtgtatgtacctccctgtggtcctccatggctatgaaggtgtacccccctgtggtcctggtttgtatttccctgtgacagactgagacggggtaggacatcatttgctgtgcttcctggctacaagcatgctttctctggaaagacatttttgaaacgaatgcaagaggacccgattttgcttggaataggcagaagcttctcgccagagtgctttccacaaaggtcatttcgtagaagcaagtactgattccccaccaccccaaatcgcaagaaggggggacttatttggaggcaaaggggtttccccctgggatcttgacacaggaagctctgtaggtcttcagggacctagaaaggcatccagtcactaccctgcctctgttcctctctcaggggcagtgtggtcctgtctccgtccctcagtgcacgtctgctcttgctcagaaggtcctgacctctgctctccaccctaccctgagctgctcgcttcccatgacacaagccccagtctcgttgtcacgtgaccttagggccccaggggctcccactagacccaggctgctctgtctcctcactcagaatttgtcctcagaggtcaggagcatgccccaacctaatcagctgtaaacagagggccaatcactgaaggcacacactggcaaatggacccagcctttagtgagagctcatgggcaggctcaaggaagggcagcggactcaggaaataatggtagcactttgcgtgtggagggaaacaacctcccccagcacacagcaggtcatttcacacacttcctcgaagtggaaacttaattgttctttggagactcgactgcatggtgttttgctggggcaaacacgtgaaggaacgattcgttagagtggacacaggtgaaaggctaaggcagactggaaagaaacgtttcgctgaagcagacacaggagagaggatgttctgttaaagcaaacaagtgagtggacaggtgatgaaggatcctttgctatggacacacatgtattcgtccaccttacattgctacatttgttgggttgccatagagagaaacccaaaaaacttctggtggtgtgctgcagtttgttgctgcttccaaggactcgggctgattggatacaggcgctgaggcaaggcacggagaagacacgtgatgtttgggtgatataaattggactccacagagggatggagacagagcttggcttgctggtacagctagctgtgcaatgcttgtgggtcttgcgtcttcatcttcgctgtctcgaatctttgccttcgctgatggcttccctgagagaggcacagttgagaacttcccctagtgttcctgttggtccctcctgctgactcctgaggctgaggcctggctgtctctgctaggtcaagtcactgctgttgctaacctgattctaccaaactggactgctagtgtatctgtgaggtgtttgagagtggatcgagctgccgctgcctgctgacctgtgaactgaactgctgatttccagacaatgcagaggggagttgctccaaagaacctttctaaacagatccacctcccacgtatcctttcttttccactacctctggtgggtagtaggttaaaaaaaaagggttaaaatgttttaaaaccatcattaaaaataagatttaaaaaaattaaaatgacagtttctcaagcatctatgagtggtccacacagggcaatatttgcctgtggaaaaaggtatgagtcctgcagataaggcggcaccaacagcgctgtgtcactgatgtcatggtggtgtgtgtggccagtgctgaaaacagccgccacgttcacgggtgccctttactccatgagggctgatgttatctcagggagaccagcaccctcagatcagaatatgtcagtgcacattcgctgtcactccatctcctcaagagtcaagtgagagctgtatgcttttcccatcttttcactcgatgccaacggaaaatggcaatcatctcacgtctagaatgtcacagcttgcaaagaacccaaatgtgtagctctctcacatatagcctcaggagtcggcctttgtgaaattcaaacaccagaaaaatacagaatttccaccattatccgatgctctgacctgaggacaacaagcaatggtgctggggctggagagatggctcaggggttaagagcactgactgctcttccaaaggt

SEQ ID NO: 222 - DNA, 1570 bp, Homo sapiens
ctgggttggtcccgaagcctccaaccacctgcacgcctgccagggcctctctggggcagccatgaagtccctcgtcctgctcctttgtcttgctcagctgtggggctgccactcagccccacatggcccagggctgatttatagacaaccgaactgcgatgatccagaaactgaggaagcagctctggtggctatagactacatcaatcaaaaccttccttggggatacaaacacaccttgaaccagattgatgaagtaaaggtgtggcctcagcagccctccggagagctgtttgagattgaaatagacaccctggaaaccacctgccatgtgctggaccccacccctgtggcaagatgcagcgtgaggcagctgaaggagcatgctgtcgaaggagactgtgatttccagctgttgaaactagatggcaagttttccgtggtatacgcaaaatgtgattccagtccagactcagccgaggacgtgcgcaaggtgtgccaagactgccccctgctggccccgctgaacgacaccagggtggtgcacgccgcgaaagctgccctggccgccttcaacgctcagaacaacggctccaattttcagctggaggaaatttcccgggctcagcttgtgcccctcccaccttctacctatgtggagtttacagtgtctggcactgactgtgttgctaaagaggccacagaggcagccaagtgtaacctgctggcagaaaagcaatatggcttttgtaaggcaacactcagtgagaagcttggtggggcagaggttgcagtgacctgcacggtgttccaaacacagcccgtgacctcacagccccaaccagaaggtgccaatgaagcagtccccacccccgtggtggacccagatgcacctccgtcccctccacttggcgcacctggactccctccagctggctcacccccagactcccatgtgttactggcagctcctccaggacaccagttgcaccgggcgcactacgacctgcgccacaccttcatgggtgtggtctcattggggtcaccctcaggagaagtgtcgcacccccggaaaacacgcacagtggtgcagcctagtgttggtgctgctgctgggccagtggttcctccatgtccggggaggatcagacacttcaaggtctaggctagacatggcagagatgaggaggtttggcacagaaaacatagccaccattttgtccaagcctgggcatgggtggggggccttgtctgctggccacgcaagtgtcacatgcgatctacattaatatcaagtcttgactccctacttcctgtcattcctcacaggacagaagcagagtgggtggtggttatgtttgacagaaggcattaggttgacaacttgtcatgattttgacggtaagccaccatgattgtgttctctgcctctggttgaccttacaaaaaccattggaactgtgactttgaaaggtgctcttgctaagcttatatgtgcctgttaatgaaagtgcctgaaagaccttccttaataaagaaggttctaagctgaaaaaaaaaaaaaaaaaaa

SEQ ID NO: 223 - DNA, 302 bp, Homo sapiens
tttttatacatatgctgtgatttattaagcatgttacgggaactttaaaacacctcattcagcagaaaggaggcagaggattataatcctcatttgacagatgggacactgaggcccaagtcctcatgttccttcagtctagaaagtgaagagaacttgcactgtgtgacaagggccaggcgaaagacacaggagaggaagatagattcctgtagaccttgtttgtcagggaagatcccttgggaaaggtcagtggttgaattggaccttgagggacagagaagtttttttttttttaagca

SEQ ID NO: 224 - DNA, 533 bp, Homo sapiens
tttttttttttttttcaaatataactttatcatttatttccagtaattatttttacaactttcctgtcttctgttatctgttgccatctgagtttacagggtgccataactggagcttaatccctttttacagccaacatgattctcagtcacataaaattggttcagtctgttgactactccttcagcagctgcatatcacctcattctttccacttgcacatgacgcactggataaacccagcgagaagctgagagttcatttgtccttttggagagaggctagagtcagatgcttcatctagagattccagtcagctcttcttggttggcaattcctcttaccatcaatctagtgttgactttgggtaaactacttaatctctttagcatctgcatcctcacttgtaaaatgagaggtttaaattacagtttccttccagcgtgacttgtcatagcctcttgcctcagctgccctcgcctcgatccaggcggggtcaggatgcttcttggtgttccactgtgggctcggc

SEQ ID NO: 225 - DNA, 2264 bp, Homo sapiens
ttcggcacgaggctggatcatggctgccgcgccgccgctacgggaccgcctgagctttctacaccggctcccgattctcctgaaggggacgtccgatgatgatgtcccgtgtccgggctacctgtttgaagagattgctaaaatctcccacgagtctccgggcagcagccagtgcctgctggagtacctcctgagccgcctgcacagcagctccggccacgggaagctcaaggtgctgaagatcctgctctatctgtgcagccacggctcctccttcttcctgctcatcctcaaacgcaactctgccttcatccaggaagctgcagcttttgcagggcccccagatcctctgcacgggaacagcttgtaccagaaggttcgcgcggccgcgcaggacttggggagcaccctgttctcggacaccgtgttgccgctggctccctcccagcctctggggaccccgcctgccacaggcatgggctcccaggccaggccgcacagcaccctccagggtttcggctacagcaaggaacacggccgcacggctgtgaggcatcagcctgggcaggccggagggggctgggatgagctggacagcggccccagctctcagaattcctcccagaacagtgacctgagcagggtctcggactcgggcagtcattccggcagcgacagccattcaggggccagccgggagccgggtgacctggcagaaagggtcgaggtggtggccctgagtgactgtcagcaggagttgagcttggtgaggactgtgactcggggaccacgcgccttcctgagccgcgaggaggcacagcacttcatcaaagcgtgtggactgctcaactgtgaggccgtgctgcagctgctgacctgccacctgcgtgggaccagtgaatgcacgcagctgagggcgctgtgtgccatcgcctccctggggagcagcgacctcctcccccaggagcacatcctcctccgcacccggccgtggctgcaggagctcagcatgggcagcccgggacctgtgaccaacaaggccaccaagatcctgaggcactttgaggcctcctgtgggcagctgtcccctgcccggggcacctcagctgagcctggccccacagccgccctcccaggcccatctgacctgctgaccgacgctgtgcctctccctgggagccaggtcttcctgcagcctctgagttcaaccccggtctcgtcccggagccctgctccctcatctgggatgccgtccagccctgtgcccaccccacccccagatgcctcccccattccagcccccggagaccccagcgaggccgaggccagactggcagaaagcaggcggtggagacctgaacggatcccagggggcacggacagcccaaagagaggccccagcagctgtgcgtggagccgcgactccttgtttgctggcatggagctggtggcctgtccccgcctggtgggggctggggctgctgcgggagagtcctgtcctgatgctccccgcgccccccaaacatcgtcccagaggacagcagccaaagagcctcctggctcagagccgtcagctttcgcgttcctgaacgcctgacccgatggcctggccctggagtcttcagcttcagctgctgtctggggcggtctgtgcttcctgagcagcctcaaccgtagctgctacagtctccaggcagcttgacttgagaggacgaccctagggctacctcagtttcccccatctcctctgccagaggctctggctatttggacttgaatccctacgagggatggcaggtggcagggcttcagaaatgtcgatctcagggctctcagggggcagtccctgcctgtcttgccctcagacatgaggtttcttgtatgaatgcggaagcgactaccaggttccttatttcattttgatctcagctccctccttccccaggaggtcatgagcagcaacaagccactgctcccccgtcccatcggggtgggctaggtgctgaggctgggtttggtgcatgtgggttgagggtgtcttgtccgggctgccttgtgctgtctggcctgaggccatttcaagtctcagatccctacgtgatccttccctggctctcacctgctcctttaggctgtaattgcttcctacacacgaagcctctgattggagcctctggtccatctcagaaaaaccttccaagagcgctggggtttatgctttctgaataaacactactgtttacatgaaaaaaaaaaaaaaaaaa

SEQ ID NO: 226 - DNA, 31737 bp, Homo sapiens
gaattccttatttctattgagtcataatcaatagaggttatctaaaacttaaaaaaatagggccaggcacagtggctcacgcctgcaatcgcagcactttgggaggctgaggcgggcggatcacaaggtcaggagatcgagaccatcctggctaacacagtgaaaccccgtctctactaaaaataacaaaaaaaagtagccggtcgtggtggtgggcgcctgtagtcccagctacttgggaggctgaggcaggagaatggcgtgaacgtgggaggcggaggttgcagtgagccgagatcacgccactgcactccagcctgggtgacagaccgagactctgtctcaaaaaaaaaaaaaaaaataataataataaaaacgccaggcatggtggctcacgcctgtaatcccagtgctttgggaggccgaggcaggcgtatcacttgaggcaaggagtctgagaccagcctggccaaacatggcgaaaccccgtctctactaaaaatacaaaaatttgccgggcctgctggtgcacgcttgtaatcccagctacttgggaggctgaggcatgagaatcacttgaaaccaggaggcagaagttgcagtgagctatgattgcccccctgcactccagcctgggtgacacagcgagactctgtctaaaaaaaaaaaaaagagcagcctgggcaacacagtaagacctccatctctacaaaataaaaaataaaaattagtcaggagtggtggcacttatcacagctacttgggaggctgaagtgggaggatcacctgagcccaggaggttgaggctgctgtgagctgatggtgccatcgcactccagcctggacaacagagtgagaccctgtctctaaacaaaaataaattgtttttttttctactggacttaaacaatctgccctccttggcctcccaaagcaccaagcctgtgtcttctttttcatcacagccgtggcagaaggaaggaggtgactggaagccccactctctctgagtagctgagggaatacaccctgactataggccgagacagtccacatcagctcttcaataggatttagtggctttgcataaaatggaaaagcagctgtgattgcaagagaaattaaaaataaccaccatctgaaatgcaaattgaaaacagtgagacaacacatgtcactctggcaggtgacccactgtgctggtgaaggcatgcaggcactctcagacttccgcagagagacctgagtaatcaattgacttccacaaagggcgacttgccaacagctatcaaaagtactcaggcacatcccacttggcccagcaattccacttccaggaatttctcctgcagaaatacatgtgcacaaacaacgtaggaaagcactgtttatagtaacaacccaactaggacagaccaggtatatttagacaacaaacaaggaagctttttactaaattgggatgatctctaagaagaaggtacgtagaaaaagcaaggtgggagaacacgctatgtgcttgtactatgcacgtcaatgaaaaaatacacaaagaattgacaggccaggtggagtggctcacacctaatcccagtactttggaagactgagatgggagggttccctgaggccaggacttcaaatcagcctgggcaacatagcaagacccccccacatctctacaaaaaaattaagaaaaaaattagccgggcatggtggtgtgtacctgtagtcccaactactgaggaaactgaggtgggaagatcccttgagccaggaggtcgaggctgcatggagctttgatcgtaccactgccctccagcctgagcaacagagtgagaaaaaaaacagactttttttctatttctggaaaaaaataaagaatttataagtatgatggttctggtaatagaagtaggtggctaggcagagtggacacttcacactgcatactcccctattttccgaaatctgagttttttttttttttttttttttttttgagatggagtcttgctctgtcaccctggctggagtacagcagcaccatctcggctcactgcaacttccgcctcctgagttcaagcaattgtcctgcctcagcctccccagtagctgggattacaggcgtgcaccacacgcccacctaattattgtatttttagtagagacagggtttcaccatgttggccaggctggtctcaaactcctgacctcgtgatccgcccacctcggcctcccaaagtgctgggattacaggtgtgagccaccatgcccagccaatctgagctatttaaaaactaaaggtaaaattttaaaaggggaaggggaaaatgggaagtcattgttttaaggggacagagtttctgtttggggtgagaaaactctagaaatagtgggggcgtggcacatgattggaatgaatggcagggaacggcacgcttaaatgttcctgtacgtttcacaggagaagtcaatgcacacacaagcgccgcaacccagtccaaggctttgctcctacagggccttacagggggtatttgagacgcccaccttaatgcaggttggacccagctccgggctgcggggcttccccgccccggggtctttcgtgtgagccccgtggcgggggatcctggcccaggacatggcgcggagaaggctgtgggcggcgggacagggtgccttcggctgccgggttaagagtggatcccgggatacatcctccagcgcctgccctcgggcctgtgtgcacccccatacccagcggggccgtccaagagcttcaaggagggcacagcgcgacccgccctcccctcagccccgcacaccgtcccacggccccgcacagcctccctcccacacagcgccccacggcacccgcacagcgccccacggccccttcatggtccccgcacagcgcctcacaacccgcacacagcgcctcacggaccctttacggcccccgcagagtctcccacacggcgccccacacagagcctcacggaccccgcacagcgcctcaaggtctccgcacagcccccagcacagcgcctcacacagcccttcgcacagccccccgcacagctcctcacgggccccacacagctgccgcacagccccgcacaagcccgcacagcaccagcagacaggtagcccccacaggcaacagcgcccacctcgccgcgcccagaccccggatcgccgacgcggacgccaggcgcctgggcacacggcgcctgcgcagacaacaccacgccccaggcctggcgagcgcaccctgcgggtggggcggacctacgtcagcaacccatcgtccgatcccgtccattggctgagaggtaatgcgtgcgcccgactcgccgctgattggtcggcgcgcgagcagccgggctcgcacgggccaatcctgtggtagcgcgtgaggaggcagaggcctctggggtgggatcgcgggccgtaagtggctgtggagctggggtcactgcgcggtgggaccatggcctcggagaagccgctggcggcagtcacttgtacagcgccggtcaacatcgcggtcatcaagtactgtgagtgccgcgggccggcctgggacggggatggccgggagcgaggccgggtacgcgggggtcgcgcgctgattcggcggcgcgctccgtcctgccctcccagggcctcgacagacggggaaactgaggctcagggaggggcgcggcggtggtcgggcggggccgcgcgctccttcgcgtgacaagctcggcgccacccgttcccccgcgacggctgccgcccctgcagggtcgcccggcgcctgcccattagcgattaccgaactatcgaaatcatcaatcatcgattcccatgaatcgtaagaatccgccgtggtggtgcgcgtttgtggctccagctactcgggaggctgaggcgggaggatggccagagcccgggaggtcgaggctgcagtgagcggaaatcgcgccactgctcccccagcccgagaccctgtgtccctccctcgccccgtttctcccagcggtaacctccaaggagcggtaatggggggcccgcaggcccacatccgtgccggggaggccggtccgcacctgtgcgttcacagccccgcccctcccctcgcgccggggttacctggccgccactgaccactcatttctgtaacgtcatttcaaaatgttctgaaactggaatcgcagttatgtggcccacccagtatcttttgagtttggcttatttcattcagcatagaatgtggacgtgccccgggattgtatcagtgctttgcccctctgttgctgagccagtccgtggaatccatggaccaccctctctctagccaaggcctcaccccgcaaagagcatctaacgttttctttctttctttcttttctttccagaagccgccaccacgactggctaatttttttgtgtttcccttaccaataaagctgccataaaatgttgtatacaggtttttgtgtgaacatacatttccattcttctgggataaatgcccaggagtgcggttgctgggtcagatggtagatatatatatatgcctctctgtctctctctctctttctatgtatatatgtatgtttgtgtgtgtgtatatatatatacacctgtatagatatatgtgtgtgtatatgtatacacctatatagatgtatgtgtgtgtatatatacatatatatattatatatatactttttttttttaaagaaactgtctaattgtttttcagagtggctgggccattttgcatccctacggtgatgcagattttccgcatcctcaccagcatttggtggagttgctgtttttcattttagccgcgtcctggtagggatgtgctggcagggtgctgtggtcctcattcgcgtttccctgttggccagtgacgtggagcatctttctttgtgcttatttgccatctgtgggttttcttggtgaaatctctcttcatattctgtgtccacgctcgaactggatggtttgcttttttactataagtttggagagttcattacacattctaggctgggcacgctggctcaagcctgtaatcccagcacttggggaggctgaggtgggcggatcacctgaggtcaggagtttgagaccagcttggccaacatggtgaaacccccgtctctactgaaaaaaaataaaatatgtattctagatattagtctcctgttggacatgtggtttgcaggtattgtctcccaaactagctaatctttttgtcctcttaacaaagagccagtttttcattttaaagaagttcagtgtatcaatgttgatgtcaagtctaagacctctttgcttagccctatgtcctgaagattgtctgctttcctccaagttgtacaggattgccttttatatttaagtctgtgatccaaggttgtccagttagcccagaaaggctatccttcctctattgaattgcttttgcacttttgtaaaaaaaaaaatcagctgggcatgtttgtgtgggtctatttctggattttctcttctgctattttttttttttttttttttttttttgagacagagtcttgctctgtcacccaggctggagtgcagtggcacaatcttggctcactgtaacctccgcctcctgggttcaagcaattctcctgccttagtcttctgagtatttgggactacatgcacgtgccaccacacttggctaatttttgtatttttagtagagatggggtttcaccgtgttagccaggctggtctgaagctcctgacctcgtgatctgcccacctcagcctcccaaagtgctgggattacaggtgtgagccaccgcgtctggccttttatttttattttttatatttatttattttatatttatatttttatatttatttgtattacttttatatttatttttttgagacagactgtcactgcgacacccaggctggagtgcaatggcgtgatctcggctcactgcaacctccgcttcccgggttcaaccgattctcctgcctcagcctctcgagtagctgggactacaggtgtgcgccaccacacctggctaatttttgtacttttagtggagacggggttttgccatattggccaggctggtcttaaactcctgacctcaagtgatctgcctgcttcggcctcccaaagtgctgggatcgtaggtgtgagccactgaggctcaccaacagtgatatttatggaaacgtgtccattttcttgtaacgttcagagactctggtcttctttaaaccttacgtttgagctggtttttgatagcgcgctggtggaggagggggtgctggctcaagataaggaggcagaagtccaggttcccctccccaccaacgctgtcccatccccaccaggccctcaggaattcctgagtgtctgcttggcctctgacaagagccggcaggtcaggggagtccagtctcccgtgtgctctccaatgactcctggggaggtgaaagtccccactccttcagggagggaaagggggcggggcactgttccagcctggagtgtgggagggatctgtttctttttttcttttctttttttttttttttgagaaagggtctccctctgttgccaggctggagtaaggctggagtgcagtggtgccatctcggctcagtgcaacctccgcctcccaggttcaagcgattttcccgcctcagcctcctgagtagctgggataacaggcgtgcgtcactacagcctggctaatttttgtatttttagtagagatggggtttcaccatattggtcaggttggtctcaaactcccgacctcaggtgatctgcccacctcgacctcccaaagtgctgggattacaggcgtgagccaccgcgcccggccaggagtctgtttctgtgttgctaggctgcccttcctggtcctgctagggagggctggctttggttggcagttccagcttctgcagggctaggtctagggcaagcagaaaagaaagccccgggctccccctgcactgtcccacagccgccctctgtcacccgtgagagtctcacctgtgatgtccagggtctcagttgtccccagtgggaggaagcgggagaagtcccctggcccaccttcctgaaagcagaggttcgcccggcctgtcagggcagcggcgtccgcctgcaaggggggccgctcagtgctgtgcgtgaaagagcctcgcgagctgcagggcgtggttctctgccaggtgtccgcgtttatcacccctggaactgtccgccatcctcagagacctcccctcgcacaaaaccgagcagatggtgtgcttagcgaagccgccgtggaataagacttcagctgaagcaccacgcagcgctcccagggcaaacgtttcctttcgggctttctggaagtttgatttcacgtgctgtcccatggccgtgctgggcagaaaggggtttatcctggatgttcctggggcatatgagcagtgagatgtgaggagttctcagagctgggctccttttgtttgggaaggtggaggggaggcaggccgcggtgggagcgatccgcacctgggcactcacggatgctggagtagaagcgatgaaggaatggggagcggggacggaggttggctggcctccagctctgctctgggagcctgagctcagtggggtgggagcagttcttgcaggccggggtctggcaggaggaggggcacacaggttgtgcggtgagagacgggactgaggcggatgggggccgtgggtggggggtgggggcacctgtggggaacactgggggagggtgggccgggaagcccaccggcctggccctggctgttcattacagggggcaagcgcgatgaagagctggttctgcccatcaactcctccctgagcgtcactctgcaccaggaccaggtatgtgtggactgacgactaaacaccacagtgccatttccagaacatttgtagaacagttggtacccgttgggtatggtggctcacatctgcaatcccagcacttggggagagtctcttgagcccaggcattggagaccacagtgaaccatgatcgcaccactgcactccagcctgggtgacagagtgagaccctgtctctgaaacaaaaaaaaaattggtacttttttacctaaaggctaggatgagatggcctagcgacgactcccagccagcacgcagtgtctgttccatctcccagtattaggagagctgagcacagcacacatgtgcccccaggtctcgtcacacatgcgcacaccgtgccccaggggctcccctgggagtccccgtctctttattcaggataaggcctggttgctccacaaggtgtggcccacgctttcatcccccacgggcttccccactgcccagctgagactggcctttccccccctgccctcagcagggctgaccttgctcgagtgggcagccatgaggctctctcagtagaaaggggtacctggctggcatcggtcctcaatgctggcctctgaggtggccctgggtttccttttcagttaaaaaccaccacaacagccgtcatcagcaaggacttcaccgaggaccggatttggctgaatggccgggaggaggatgtggggcagccgcggctgcaggcctgcctgcgggagagtgagctggggtccccataagcccatccctccctgttgtcagcagggtccgagcatccagaaagtgcttctgcctctgtgcccctcctgaggcagcaggcggggtggctgggaaccagacatgcccgctgggccgccagctccagggcagtggcccacctcaatgaccagctgggcttgggtcagtctggggttttcccgggtaagaaactctccacgaggagtctggcaggcagaggcctggtgttcagctgtgaccccgggcaggtgggcaggagcagggcgggcagggtgctgacggctgggccacacgctgtctcattgtctctgcagtccgctgcctggcccggaagcggaggaactcacgggatggggacccgctgccctccagcctcagctgcaaggtgcacgtggcatcggtgaacaacttccccacggctgcgggcctggcctcctcagcggcgggctatgcctgcctaggtgggtgcccacagagacccgcaggggttctgggctgtgggcgcaggagccacttcatgctcttcccgggtcagggagcccactgctgggcgtggctaaaagagcatcccctcaccccaggcctccctggcctctctggagttgttcagtctcttcccagagcacatctgaacattttcatcttccagttgcagctggcgtggggctctcgcctgtaatcccagtacttaagaggctgatgggggagaagcactgtaggccaggagttcaagaccagcctgggcaacatagtgagacccccccccatctctacaaaaaataaaaaaatcttcccgttgctgtatgtggagcccctctagattgtcagtgatagaaaccacttcaaactggctcagccctaaaatagcgatgattttgtggctcacgtaactgaggattccaatgggcacagctggttgcaggccccgctggacccagctctctgctggccccaggccacttgctggcagcttcccacccactgtcagagcctgtccccccggtggtggtctcacaccatcttcacccctcaactccaggggtgacgcttcctggcccacctgggctcctgcgccttccctgaaccaccctcggtgaccagggtgggtgaccagacctggaggtggggttgccctgctggagccctgtgggaggaggggagaaggtggctcccgtgctgggtgggcagggggcgcgtcttgtggagtccagctctgtcctggcatcggtccctgccccacacagccttaaaattccttcccaccctcaaagcccagcttgggtgtcctcgggggcctttctcccgccttccatggggcttcctgctctgccgcaggtaccttttgttgcccttgtcgcgggccgcaagctctgcaggccgtgaacagagagtgtccgagagtggaactagcggaggtgggggacagacggctgggccggtgaatgctggcctcaaaggctgatggcccagaagccctgtcatctggaaatccccatttgccgtggggtgtgggacgttcctggggcggtgagctgtcagggagcacagcgcaggcagctctgaggaccctccctgaatccgcatgcctgcagcctacaccctggcccgtgtctacggcgtggagagtgacctctcagaagtggctcgccggggctcaggcagcgcctgccggagcctgtatgggggctttgtggagtggcagatgggagagcaggccgacgggaaggacagcatcgctcggcaagtggcccccgagtcacactggcctgaactccgcgtgctcatccttgtggtgagtggggtggggcgggtggagcagcagcccggtggcctctgtccctagtcagggctgctgccgggagcaggagcgaaggcgtccatccaggctttgcttggctcctggggtcagcgggggctgaaggaacagaagcgtggttgagtgctcaggaaccgctcccatgcggcgggcgccaccacccgctgggatctggaagttgcccctgcgtcacccctgctgtggccgggaggcctctgtggtcaggcaggtggcactgactcccacccccgctgcctgcattggctgagggagggccgagtgtttgaggctgaggtccttggggctggccccctgcagggtgtggcccaggctgtctctccctcgtgcaggtgagcgctgagaagaagctgacaggcagtaccgtgggcatgcgggccagtgtggagaccagccccctgcttcgggtaaggccaggagcgggtggtcccggggccctgggagtcacgcttgtgcccggctctgccctcagcctctgtctgggcccgagtgttctcacacctgcggcagccccgccaagaccacgtgcaggagccaaatgcagagatggggctcgagccgggcctccaaccccggagtctctcctcgaaccctctgctgtcgagacccccagcggctccatgggaaacaccctgtgccttgcagttccgggccgagtccgtggtgcccgcgcgcatggcggagatggcccgctgcatccgggagcgagacttccccagcttcgcccagctgaccatgaaggacagcaaccagttccacgccacctgcctcgacaccttcccgcccatctcttacctcaatgccatctcctggcgcatcatccacctggtgcaccgcttcaacgcccaccacggggacaccaaggtgacgcgggccgggagggcagaggctgcgctcgcgctgtagcgcgtgtctaggcttgtgctgccgtggagacggccccggggctcgcgtgcagggcaatctgtgtctgaaagctccaccctgctgtgtgcgaagctcactgaccatctgggttcttctgtttcattttgtttcttgacttgcccgggtcacggccccaccaccttcttcctgggttcacaggcagacgtgtcaagtaccaggcacttggggtcacagctccactccagtgtggccctgagggcctagactgagctcttggagagcccaaggccgcctggcagaccagagggttggggagacaagggtcaggcaccacgtgaatagccagggtgactgctgtgggttccaggtggcgtacacctttgacgcgggccccaatgccgtgatcttcaccctggacgacactgtggctgagtttgtggctgctgtgtggcacggctttcccccaggctcgaatggagacacgtgagtgtggaccccgcccctcctcctttttgggagatggtgccaggaactctggtcggaagagacggaggcacctgaaggctgtggcgctgagacagggagtcccagggcaggcagcagtcccccgagtgtgggagccacgggcagggtgtccccatagagccatcccacagcccacgtccacagggaagaaagagaggccgctcacgcgtgtgtgagcaacgcccagggtctcccacctcctgagtgacagcgtcccctgcagctcgggaccccgcaggctcttattctatagaacagtggcttaggaaacacgcctgcactcccagatgtgtgcgtaagtgtccgacattttgaaggaaaggagtcaaagcccctgatttccttcttactgaagcgagttagagccagtcaaggcggccgggtgttgaccccgccccggcagttgggtgtcttttcttgggtggggtccggcagctgcatcttggcgccacagagcccccatgtacgccctcctcggtgcacagcttggccctgaaccgcctcttcccctgcgctgctctgtgggggtgccacagagcccccatgtacgccctcctcggtgcacagcttggcccagcctccttacgccccggggctgttgatttcttccctcccgtgttttcatggtgtcttattctcaatgtgagaggcgcctcccatttaagggtgtctggaagcgtgtggggatgtgcgtctgtcccgggtgggagcaataacaccttctaatggtcaggggcctgccctgtggggtggactcagacccacaccccaggactgcccgcctgggaagcaccaggctcgtggctgctgctccgggtggggcttgcaggcttccgctgttctgcagaacacggtgacgaacgcaccagcttgaattgggcgcttccctgagctgttaccccatggggcttggcagcacccttggccagatgtgggtccagcctgggcatagctgtttaccacataacctaaaatttcctgtctcagccattcgagagcatataatcctgcggtgttgaggacattcacagggtcatgtgagcaccacctcaagccacctccttaactttttcatcacccctaaaagaaacctgtccccacagcagccacctgccgtctccccctccctgagccctgacggccaggaatgcacttcccatctctggacttgcctgttgtagactgttgtagacgcttagagaaacggatgcattcaccgtgcccctgccctgcttttccaggtttctgaaggggctgcaggtgaggccggcccctctctcagctgagcttcaggctgcgctggccatggagccgacccccggtggggtcaaatacatcattgtcactcaggtgaggcctggggctcacccagtaccccggggtttcctttcctgccaggggggcccgcccagcccccagggcccttaaaggctaagcgcggctccctgtccctaccgtgtctcaggcaggaagccagaacgcctttgtccattcatttgctctcaaagtggacattacaggccactggtgatgctcagagcagcagggctgcgctgagggtgggagggtgagtctgacacaggctcccagggagacaggtggggagtatcagacccttgaatagggagcgcctggggtgggggctgctggggtccctgggacccccccaccccaaccaccccagcagaccggagttcctgccctctgacctgctccgagggccaagcttgcatccagtgatcacggccgcccaagccattgccgccaccttcctctcaggggctgcctgttcccaggctctgtggttctctgtcccccctgtgacagaagcagtgcccagggcagggggctcgcagctggcaggggcggctgtgcctgcaggagctgcgtgtgggtgtcaccactcaggcgctttaccttctgaccaggacccacaggaagggcgggggcacaccgctaccctcctgtgtccggccctacagatgctgggcacaggatgaggcgctgccattcctggtgacctgacatggatttctatccccaggtggggccagggcctcaaatcctggatgacccctgcgcccacctcctgggtcctgacggcctgccgaagccagctgcctgactgcctcagcagggaccgcatgccgcttggagaaggggtggcctcgccggagctagggagcggatgtggtgggctggccggactcctgggacatgtgggtggtggcttgaccccgggcccatgggcagcttgctgtggggcagtgcagggagtcctgcggccgcccaggtgtcaggagaggtccccgccgagtgcttcagctgccctaagctgcaccagcgctttgccaagatgggatggggagggggtatgagaactggcagagcctcggtgcagcagggctgaagggctttctcaccccagctctggctatgcccagttctctgagaaaggagctcagtggggaggtggtccctccagcggaccagggaaggggtcaccgtgctgggagcagcctccttgggcctcaggaaaccaccaagtgcctcggatggtggctgcccacggcgcttctgctgagaccctgcccccggcccaggtgtctcggagggtggctgcccacggcctgggtgtggctggaatggtggcaggagtgggcaccagtgcggccccggtggccatggggaataaaccagcattgctgcctccggcctccgccgtttttctgtttcgtaaaccagcatcccggggttcctgctctgagtgaccctggcacctgtcagggagtccaggtgtgccccatgagggcctgggggaggggcaggctgggcagagccacagaggggctcccctcaaaccccacattggctcaggtgggaccctcaggagcaaccccaggtctaaagtcttcccatgggcgctgggctcaccacccccacgccagcccctgcctcccgtacccaggccggacgtgacggggccgtccctgcattctgtgctttcccagttgtacacatcctgtcccctccctcgagtctcagtcacagttcagtgacctggtgacgggaggccccctgcagtgtctgacccaggccacgcctgtgccagcccagagccagggggaggaaatgggggctgggcctctggtccccatggggaggccacccttgtccttggtagcatcagggtgcagaggtgttcccgggctgtaggggtgactcccccaccccccaaggctctggagaggccgatttgctcaggaagccgaccttcacaccttgtcctgctattaatagacgcctggttgacacgggaccctcggttgggtccggagcattgggcaggggcacttgtcagtgtttgagagctgaagtttgggaagccctggggaagcgcaggaactccccgcctgggctggggctgccgggcagggcccctcctatgcctcggcgtggctagagagggcgggggcagaaggctccgggacagccctgcaccctacagatgcgggtctccgcccagccgcggtcacctggggggctgggggcggggcctgggcggggcggggttcggccgggagcgcaggggcggcagtgcgcgcctagcagtgtcccagccgggttcgtgtcgccatggggcagatcgagtgggccatgtgggccaacgaacaggcgctggcgtccggcctgagtgagtgcacgtcagggacggtggaggctgcagcctggaggggtgtcccaagaccccagccgggacctcgggctacttacagggtggggaagtggggcgccaggcgggccaggccgggccggggtcaggccaggagggtgcggggaacgggggcgggaccctcaggccgcgggctggaaggaggagttctgagacccccagtaattcccttgcagaccctgcggagcgcggcgcccctcccccattcccttctctcggtcccccgactccgcgaaggaggaagttgcagcgcaggggaagaggcggttcagccccggtggtttccggggtcaccgccccgaagcccccgagtgggggctccggcctgggcatcgggagaagctcccctgcccctcggtagccagctggcctggaggtcgctctccctgggcttggggtggggaatgggctcatgccctggggctcagcccttctcatctggagtctgcgctggaggcggtctgagatttcacaaggcgccgaaaccacccagtgacggccctgcccagcccagctgcacaggcactttgctcttggggtgggatggcacagcccccagtcaccctcctgtgcatttgctcagaggttctggtgagggcagcggactccatttggaaatggaccctctcgggaccagggccagggagtgtctggcccagcacgggtgaggctgggctcaggcgaggtctgagggcagaggcaccactgcagcagctccaggaaggacctgcaccgggggaggagtgcctgggaagggcctgggggctgagggtgaggaggaggggcccgctgccaccactcccctggggctctgagcgccctccctgttgtctggagggtgcgtggcagctggagtgggagcagagacctcagggtgggagggctggaggacggggccctgcagcctgtcctgtgcccaggaaagtgaccgcctgcttcgagtcagcggccaagaagtcggtgggtcagttcagacagctctccccagagctgccccgtgagactcaccctgcctgccccgcactccctacaggaagtagacggactgagggcacccagctgggagccaggagacctgggctctagtctggcctcctgctgaaaccctccaggggctcctggcccgaagagttagagccagactggacgccctgcactgcccgccctggcctcccggctctccggccccctcctccagctgccgtgcttcctttctgttcctagatctcctgagcgtgccccagggcctcggcacaagctgctgcttctgcagagcctcatggctgtctcatttatttctcaattcaaatgccacctgcctggggaggtccttccagaccgtgcagccccaggaggcagctggcccggagacagcagggccttgacaaagagtcccccctgtacacagcaggtgctctgtaaatgtggctgggtgccagaatacgtcctcagacctccctggtggcaccagcggcagctttgcaccctctttcggatggcaggctcgggaccaggacggtccccaaagatgcatggacaattggctgagtagactcaaggacactgccctcccctcctccgacgcagacagacaaacccagagagttaatgtgtagctgggctcaaaccaaggataggaaatcttccaacaagaccatgtggagacaaaaacagaatggctggcagggcaaggtggctacacctgtaatcctagcactttgggaggccaaggcgggcggatcacgaggtcaggagatcgagaccatcctggctaacacagtgaaaccccgtctctactaaaaatacaaaaaattagccgggtatggtggcaggcgcgcatagtcccagctactcgggaggctgaggcaggagaatcgcttcaacctgggaggtggaggttgtagtgagctgagatcacgccacggaactccagcctgggtgacagggcaagactctgtctccaaaaaaaaaaaaaaaaagaaataaaatagtaggaaggaccaggcgccgtggctcatgcctgtaatcccaacactctgggaggccaaggcgggcggattccctgaggtcaggagttcgagaccagcctggccaatgtggtgaaaaccctgtctctaataaaaatgtaaaaattagctgggcatggtggcgggcgcctgtagtcccagctactcaggaggctgaggcaggagaattgcttgaaccctggaggcggaggtagcagtgagtcgagatcgcgccactgcactccagcctgggtgacagagcaagactccgtctcgaaaaaaaaaaaaaacagtaagggggaatattggacaatacccccccaaaaatgtgcagaaatagccatatcagacgaaaccgaaattaaggcaaaaccgctgacgggttaagaggaactccgtatcggggggaaaaagacactcccccaagaagatgcagaaaccacactcggcctgttagctttcagtgcatcaaacaaagactcatggtgacaagggggtccatttgggggtcccagagcccactggggcctgcaggtcgggctgtccttggccactcctgggacccagagcccgggcatgtccagcaccccctccgccagcccgtgcgccacaggctctgctcttcaccagtgcagaggggtgcctcctgggggtgtccccgaccctgtcactgtgctgtggggatgggtagggggcagctctgggtggcctggtggcccacagtaggtagagaaggggggtggcccaggcccccgggacgggagccccacagtgcctgacccacttctccccgcagtcctcatcaccgggggcatcgtggccacagctgggcgcttcacccagtggtactttggtgcctactccatgtatccttccacctgaggctggggtgggcggggaacgcccagggcagagctggggagccacttcacagtgagctgtttgcctccgctccccaccaccgcagccaggctgggacacagggtgggctgtgcacgggttgggcagcccaggccccagcagccaggcccctcgccaggaccatgtggcgatcagcggcagacccgccagtctaagtcctggtgagtggtgggcagggggtgtcaccagagggccagggccagcactgaggcctccctgttggactgctgggatcccctctgcccgctcctgtcagtcatcccccttgaccggcccctctacctcctctgccccatctcagccctgccgcccagccggaccttgcgacaaggagcactgggcagggtggtgggagggagggcgtgggcagccccgagtgccagacctgttggaacctcccgtggctgcctcctggctctgtgacctcaggcagtggctgcccccgaccttttttgagacagggtctcgctctgtcccccaggctgcagtgcagtggtgcagctgtgactcatggcagcctccacctgggctcaggccaccctcttacctcagcctctggagtagctgggaccacaggcacacaccactgcacctggcttttaaattttttgtagagatgagggtctcactatgttgcccaggctggtctcaaactcctgggctccagtgatcctcccgcctcagcctcccaaaatgctgggattccaggcatgagccaccgtgctcgggcccctctctgtgttgtcttcagtaaagggagttccctgtggcccctcaggctgagctgggctgttccttaaccacatggcttcagtgtggcgggcgtgtttgtgtgcctgctggagtacccccgggggaagaggaagaagggctccaccatggagcgctggtgagtctcctcctgctctggggtctctccgggggctgcggggcccaggcagggctcacagggttgggtggagcttggtttctcacttggaggctccggaaccaaccctttggtgcttgtgggtaaaccaaggccggtgcctgcccggtgtgttttgtgggaggaaagaggcctgggtgccctggggtggtcagcagggcagcaaaggagtcccgagtgggagaggcccagccgcgccgtctcgccttcctccctcccccaggggacagaagtacatgaccgccgtggtgaagctgttcgggccctttaccaggaattactatgttcgggccgtcctgcatctcctgtgagtccccgtcccgcaccccctctagggctcaggagggcttggagccgaccctccccactgtcccaccggccgggctgcctggacaggagccacccccacttacctcagtgtttttccaaacaaaaattcgggtccctggctctggcagggcctgtgtctgctgtctagtgtgcaggatttgtaaggatccactccaaatccgaggagctccgatccgtcgccagggtctggggtcagcatgcactgctggggggtcttgcctgggcttcctggtagggtggagggttccgtgctgtgtgtctgctggttactgccggctgaggccaggacacccacacgtggctgcttcctccgagcaagtgcaccagagccgctagtgtccacatcaaggctgagaacacccaggaccgaaacaagccccggtccgcgcacgtcccctgggtctgcagtctgccttgtcctgagactttgtggccttggcccccagacctggggctccgttcccctttctgagtgcccttctgtgtccctgcctctcacccgctgtcccccaggctctcggtgcccgccggcttcctgctggccaccatccttgggaccgcctgcctggccattgcgagcggcatctacctactggtgagtggcgccctctgaggtcggccccggccacccccatccccagcccctgccctgacaccctcggacacgcatggcccttgaagccggctctgtaggctgagccaaggctgggagcaagtgtgagcctgggcgtgtgctcacagcacggcggggacgcagcggttgctgctgccatttttggcgtgtctagtgtgtcgggtcatttccttgcatttcctcattaacccgcaccacagccctgggaggggtactggggtccccactttacagacaaagatgcggaggctcagggaggtgctgtgactggcctggggtcacgcagccggccgaagaccgtgcctgcgcttgggtcccattatcaggcttttctcacctaaaccctattcgcgctgattcatgggcggtgccaggacgcagacattttcttaaactgccgacacctgcgtttggtttatgactgctgcaccctgttagaaggctgcccatcccatgggatacagtgatctctctgagaggccagggatgggtgggaggacagggcgcagcctggccaggccttgggtgaaatgccctctgcctgccctgggctccggaacagacggctgcaggccacctctcactgcgggggtctctgggtggacagagccctcagactttgcttatttaaatccttttgtccatagagccaagtccctcctgcccgcagaggcaactgccctccccttgctgtgcgtcttctagtgtgtgtgcgtgggaaaggtgcagcactttctgtgtacgccttccgcgtatggaagtggagttctgtttcaagcctcactgacctgccaccggcagaactctcctttagaaccccttcctgttgccaagtgctcatctgggctgttgctttgttttccgggggccacccgcatcccccccgtctccctgctgccacgcacagctagtggctcctggagacctcgggaggaattccttgtgctaaacccagagaggaattgctgggtcaggcatcagcctctgcaccgttcaccctgccgggctcagctgctcctcagcagacaacccaccaccagccatgtggccccatctctcccaccatgcactaggctttctcccacgcttgccagtttcacagcacgagctggccgtgtggagcttggactcgcccttctctgactgtggatttgagctgttggagtttcttctcccttgagttgcctgttcaaatcctttgcccatttttctattgtggtttttgtatttttctttttcttcttttttttttgagatggagtctcgcgccatcgcccaggctggagtgcagtggcgtgatctcggctcactgcaaccttcgcctcctgggttcaagcaattctcctgcctcagcctcccgagtagctgggactacaggcacgtgccaccatgcctggctaatttttggtatttttagtagagacggggtttcaccgcgttagccaggatggtctggatctccttgaccttgtgatccgcccgcctcggcctcccaaagtgctgggattacaggcgtgagccaccgcgcccggcctgattgtctttttcttaagttgcaggaagtccacatatattttagctatttagcctttgtaacctttaaacactggggatgccttcatgctttctggtgagggtctgttaacttggcgcgtggagtccttcactgcacggaagagcagaggtttccctgttcacctgctctatggtctgtgctttgtgaaaacacctttccctggccctgggtcctgccttcacgttcctgccttttcttctatcagccttctagttttgcttttcagaatggaatgtttccgttttggagtcaggtaggatcacacatgtccagtttctctttctgttcatgacgtatatgatgtgacatatttttccaccagatattatgggatagaagatgaaaagcacacactcccaggtccacttgacctgttgcagtggaacctccgggcatgggcccaggagtctgtatttttagtaaaagccagtggaatcccgtggtcttcaagctctccccccaccacccccatgtgcagaaatgcctgggcacccttggggggctgccggccagcgtgggtgaatggcgcccaccagacggagcagggcctgctactctcctgggccacccctcctgctggacctcgggcctgcctccctgccttccctgcccttggcaccttgagaggagaatttgagtactagaatttgcatctgggagtgtccaccacgggatcttccagaagcccaggggttcgggccccactcctggcatgaagaaatagcttgggctggtgtcaggccgacccaggtcctggctgtgtggcctcgggcgcgtcacttaacctctctgagtggcagtcacaccatcctgcgtgggattcagacttgagcctgtcccagggcccctagcggggtgggcctccggggagggagggagggagggagggcgggcgctggggcgcggctcaacccttcagtgccccgcaggcggctgtgcgtggcgagcagtggacgcccatcgagcccaagccccgggagcggccgcagatcggaggcaccatcaagcagccgcccagcaaccccccgccgcggcccccggccgaggcccgcaagaagcccagcgaggaggaggctgcggtggcggcggggggacccccgggaggtccccaggtcaaccccatcccggtgaccgacgaggtcgtgtgacctcgccccggacctgccctcccgccaggtgcacccacctgcaataaatgcagcgaagccgggagcgcgtgagcctctgcctggggccggtgggcggggctggggtagcgatggttcccgaggcctgggcaggcaccccgtttcctgccagccgggccgcattccagtttcattaacatcagcatcgccttccttctcagcagcacacgaaatcccgggtaccgtatattccacgaaatatagtacctggattccaggtgtgtgcctccctagaaaggtcctcccgggcctggaggaggcagcagagtcctcccttgacagctcctgcaggccctgcaggccctccacacctaacgcctccctaaggggcttggattccagaggaggccgctggcgttaagtgaaaagggaacagggtcggagccacgtggtgagcctctaccctgcgcctcttttccgtagaagctggggtgaagctggtggcggatgtggccttgtttgcccccacactgatgctggggggccccccagctgcccaggacgctcaggccaagttgcaggggcttctggccaccccttcccctcacttgtgcggaggctgtggctggctgcacacacacctgcccacaggtcctcaccaccaccccagcccggtgcccccaaagctttgcccggcgtcagccacgtcccccacctttgggctctcgccaaggcacccactcccctgaggccggagaagcccttgcctgctgcttgtccacctgctctcccagcaactcacacttcagagccagggtcctctgttcctgggggccttcagaatccaccccccaccagccaacactcggcaccatacagacgtctcaatccagcctcatctcagccgtccccccaggtcaccaagcttcaggtcacccttgaaacccccacaccccacatccaatcctggcccaaatccagaccccagctacatgggccatccccacccaggccacctgccgcctcccgctctgccctcatcccctgaaaccatcctgatgctgccattgaaacccaaagcctcaccccagtgcctccggctcagaatccgcaggctcagaacccacaggctcagctacctccagtgacagccacaagcttctgatggccccagggcagacatgatctgcacccccagcgccctgccctgcccctgcggtccccctctcacctggcatcagccacgcaggccactctctgacccttggacacacgcagcatgtgtcttctcagggcctttgcatgggctcttcctgctgcctggagctgttccctgcatggctgcctggctccttcctcctccccttcaggtcttcgaggcctccctgaccctctgcttagaactgcagccccttggccgggcgcggtggctcacgcctgtaatcccagcactttgggaggccgaggcgggcagatcatgaggtcaggagatcgagaccatcctggctaacacggtgaaaccccgtctctactaaaaatacaaaaaattagccgggcgtggtggcgggcgcctgtagtcccagctactcaggaggctgaggcaggagaatggtgtgaacccgggaggcggagcttgcagtgagccgagatcgcaccattgcactccagcctgggccagagcgagactcctcaaaaaaaaaaaaaagaactgcagcccctcccccagagcctctgtcctggactcactcacagactacacaccacttgtttcattagtcaccgtggaggcaggaagggttttcaccattttgttctcggcctgttcccagtgccaggtgcttagtagaaactcatatggctgggtgcggtggctcacgcctgtaatcccagcactctgggaggccgaggtgggaggatcacttgagctcaggagttcgagaccaacctggccaacatggcgaaaccccgcctccactaaaaatacaaatatgagttgggtgtggtggtgcacgcctgtactgggaagctgagctgggaggatcgcttgaactcagaaggtgggggtggcagtgagctgaagtcataccacactgcactccagcctgggcaacagagcgagaccctttttcaagaaagaaaagaaactcaataaatgtgttgaatgaaaattccatctcctggacaagggccaccacctccaggaagtcttccctgaggcctcttgctttgggagtctgagtggagtccttgttcttctgtgcagcacccccacccccatctccaggcacctggacgcagtaggtgggtgagccagggggccaggcaggggaggggctaacaactgcccagcagccccatggcaatgtcagcccttggggccgggggcctagagactgagaccctgagactgtcacaggcctgggccccctttccacgactggggctgctccccccggggccccttaactaaaatctccaacagagcctgggtcccgaagcgtggctagttcaccatcagggagggcgcttggccttggatgttgatccgaaccacgaaggctgggggccctgccttgagccgacagccctgcagttcatcctcagagacttgccttgggggccgagagggtgcccctaggcgctcacatcattacaaagcatagggctcaaggcactgcttgaggaaggaggctggttcctgttcccaggggtgtcctcaggggagacactgtgtgggcagagcagggacacctgtgacccccccgtgctacagctcagtcccacctgcatgcactgctcgcggctgcgtagacctttctggaaggacaccccagaattgggtccatggctggcctggaccagggctgaacgggagaatgtcgcattgaatgttggcctctggggatgtgttcatcagtttaataatacacgtacacttaaataattgtttaagaaacaggggtacttccaaggaggttgggaagaggcagcctgcgggggcctgaggccagtgatagggtaagggaagccgggagcaggacagggagccaaggtacaggcagccgtgtgacaccttttctgcagctttaagggctggaagaggtgctgagctccttctacccccaactactgaggctggagatgaggagaacagtggggggctgtcctccagacacggggaatgcccagaccccaagggtagtgttgggggaggcatataaataacaataaatacacataaatagggggtgccctctggggagcacacgtgtccagtctaggggccccacggcctcggcggtcacactgaacggggcagcacgcaggtgcagccgacggggacgtggatgaactcggtgtggaaggcaaaggccccaggtgtggggagccccgagccgtcgcgggagcagggccggcggcgcagcaccagcaggctctggagcagccgcacggagttgagcgcagctgtctcgcggcccgtccgtgcatcgatacagcctctgcacaggcactcggcgaaggccagcttctgtggatagcggtcctcatccgtgtccacactgcgggacggggtgcacagtgagtctctggccctaccctgtcctcctggaggcccctctcccctcagggcccctctccgtgtactcaggataggacctgaggcagcgagggctgagccacacgggcttggggtgcagtcgggctcacatgtggtggtaatccacgtctccccagggccctccaagagcacagagcagggtccggaggcctctaggagcctcccttccacttcatcacccagccccacttctgcaggagctcaggtgacgggcccagaatttccccaggggaccctggccacctaggacagtgggaggcagggcacggccagccgcaagcagcagctcagccgtccaggtcaggagggccggagggagggagctcaggtggccacgcccacttgacaggtgagaaccaccaaggcccagagagctctccgggcagtcagggccccgccaggggaggggcagccccacgccacagcggaatccccaggtcctcaccggtatctccagggtgagatggagcgctggtgggtgtctgcctccaacacctcctccggccgcagcaccgggcactgggtcgtagctgagggcctctcgtgcctccccctgtggcttgctgcctccaggctggacaccagggctacaggcaaagcctgcccccacttggcacctcgagccagcaggtgtgggggggcctggccgaggggcagttcctcagccgagtagcagtgtggggtaccgtgactgtgggggtgccccctgagggaggggtcatggtgggccaggcatgtgtgcagccaggtcagaaacaggaggccggggaggagctggtgaaacaggcaggtgggtggttaggaggtgcccagggcagggggcacctcacttccacctcagctttccttgttcccagcggaaagatggagtacagccctccctctatagatggggaaactgaagcccagagaggctagcccttcagcccaagacacccagcatgccagcgctccgaggatctgcagctgcctcccctacccccagactgaggggtttcccagaccccatcccaacaccctcctcccaggctcagagaaccccagcccttccatgccaggctgcacatccaagcagcatccatccgagcggcatgtggagaggctcaccgtcatggtggcggcagcggggcaggctgggcttggagcggcctgcacacctggcggcaatcccacaggtgcacctggccatgcacctggcagcagccgctcttatacctgaggccacacctgggggaaattccggcaccacttcctcctcgggaagtgcccagctggggcgcttcttccttctctggtccccgcagcccccgcctgctgtgcatcaggacacagacatgcaaggaggccccgggaggcgctgtcctgttacccccctcccccgagagagactccgcccaacctgagcacctacacagggtgctgccttgtctgacattctcaaactttttttttttttttgagacagggtcttgctgtcacccgagctggagggaaatggtgctgtcccagctcactgcaacctccacatcccaggttcaagcgattctcctgcctcaggcttccgagtagctgggattacaggcaccccccaccatgcctggctaatttttgtatttttagtacagacagggttttgccatatcggccaggctggtctgaggctcctgacctcaagtgatctgctcgccttggcctcccaaagtgctgggattacaggagtgagccactgcgcccagccttgaacctcctataagagggtttctgcttgcgtatccgtcagcaccttgctgattcaacttgtaggttttcatctggacctgatggtggcggggcgcttttgcaccctatacagttcttctccgtctgctgctggtgggtgccaagggtggttcagtgttttagctgagatggtcaagatcaggtgaggctcacgtgcccccttcacccaggtgggagaggtcccggagatgggggaggcaggcacgtcttcaggtctctgttgggtttctgtgttgtttttttttttgttgtttttttgaggcggagtctgactctgtcgcccaggcggggagtacagtggtgcgatctcggctcactacaagctcagcttcctgggttcacgccattctcctgcctcagcctgccgggtagctgggactacaggcgcccgccaccacacctggctaatttttttgtatttttagtagagacggggtttcaccatgttagccaggatggtctcgatctcctgacctcgtgatctgcccacctcggcctcgcaaagtgctgggatcacaggcatgagtcactgcacccggcctgggcttctgtggttttattgagaaaaaagttcaagctaaaaagtctgagttggaggtgtgaggagtgaggtgtgaggtgtgaatgaggcatgaggcgtgaggcgtgaggtgtgaggtgtgaccagcacacacaggaagctttatgtaagcggggccgggagctgcctttggcctccttgatcggtgaggctggctgggggtgggggcgctggaggtgcctttgtttccccggaaagggacagctgcagccagaacttgggaaggtttgaatgccgggggtttgacgtcatcctgaggagggttgtcctggagtccccagggcccctggccacatcagaggtgggggaatctgtccgccctggtcccctcagcttcggggtgagggcgggagggagggtgcttgtgtgcccccagcctttcctcccctgccgcggtgcagatgtgttccacggaggtgtcctctaagctgaaaacctcagtctctctgaacacaaaagctcccaagtcgggtggggctgaggcagcactgggacccctgggccctccagcacctcctcttggccgctgtgtggctctcagcttgtctgctgtgggcctctgggggtgaaggaggctgtgccccagggttaacagtctgggaggaatcaaagacagattgctggagtccccagggctgctcctcccgacagtgcccctgcccacccaccctctgcttgcatacctcctgtgacggggagctcactatccgtgctggtttcctagggctgtgctaaccatgcaccacaaactggggggtgtgaaatgggagaagtttattccacgaggccgtggagctgggcgtgttcagggctgggtcctcctggaggctcttccagccctcagtttcccgggctggcggctcctcccgtggcctctctgctgcacccgccttttcctcttctgtggtttataaggacactggttgttggatgtagggcccagtctaaaagataatccctccccccttctcaggacgtgggacctgccttaacccaggatgagccatctcaagatcctttccctaattacatcaaagcaaaagccccttttccaaatgagcgcgcgttcacaggttgggttagggtgtgggtagagccttttccaggacacagcagaacccactgcatccccagcaggacaggtgctcctgtgtgggttggccctgccttaggctgggctgatacaggcctctctgcacgggcgcttggctgtctcagaaaaattccagcccctcacggccctccccaaaaggcggcctgagcgccttgagggccacgtctgtggcagccccatctgtgtacccagggttgagagtagtgcagggcatacaggagggtgctctgtaaataacacagaatggaaaaaggagggaggagagcggctctccccatgggtacagtgggatgatagcagctccagtgccagggctgccctgaggcgcattagcatcacctgcctggctcaggtggtcgcaggccgcagcacctgccgccaggaggctgacaagcactcttactgttgggagacagggcggcggcagtggggcaggggtgtttgtcttttctccagagtccactcagccattcttctggggacaaaaactcaagaccccccgcaatctctgcatgccaagcacagcctgggggtagggggctgggcccctccctggctccggagtctctgggggcctcccctgggttgagacctacgaagcagccccggggtcccttctgccacagagaggggcccaggggagcctcattggaaacgtcccgaggggcctgcagctgggtgctcaagatgttttgtggaaaccctgacgagtcaccgggctcagcatggccgggcctggcctccccagtgctctgcccaacctgcccagctgcggcttggggctagggctgcaggccaggccgggtggggaatcttgaggaggggaggagggtgccttcgtgcagggttagggaacgcacagtgttgggagggaaagacaaattgatgtcagtcctcgtcctctgctgggagtccttgtgcagtgcacgacctgctcaaccatacccaagaaagagaggaagggggagggaataggagccagagggaatggaggaaaacgccaggaaaagacggggagagcgagaagccccccacctcggcctagtgccctcgtcccccatcccccggtggagccagtgaccctccctcctggcatggggaacaggtctgtccacacgtgggtcacacacgccgttccctcgggcaggacctggtcggcctgatgagggcagccagtgcctgaggaggtaaatggccgagtggaaaagttcggcaggagggagtgagcagaagaagccggagccctcgggcacaggagtgtcctccccggcctccctccctcggctgggcgcccccgcatcctgcgccccgcccaggggaggatggaagaaggcagccccaccgcggactccgctccgcccccgcctccttcctcctccgacccggggctgccttctccccagcggccgccgccccatctcccgctttgctctggttct

SEQ ID NO: 227 - DNA, 459 bp, Homo sapiens
catggaaggttttattgataattgctaaaatttagaagcaatcaagatgttcttcaataggtaaaggaatgaacaaactgtggtacatctgtaccatggaatattattcagcaataatattgatatggaggagacttacatgcatattattaagtaaaaggtggttaaaaatctatatgctttctgattctaatcataagacattctggaaaaggctaaaatatcaagaaagtaaaaaaaaaattagtggttcttaggggtttggtggcaaggaggaagggatagaaaaagagctcatgaaagagagagggaagaccggtgtgcagagtacaaaggtggtcagtgagaaaggacattccagttggtggcaataatagaagccaaggcataataattgaaaatgcagaacctgattcaatcaggacaggtcaggctgtgttgcagaaactaaaatacaag

SEQ ID NO: 228 - DNA, 2597 bp, Homo sapiens
gccgtgccccgccggcttctacggcttgggctgtcgccgccggtgtggccagtgcaagggccagcagccgtgcacggtggccgagggccgctgcttgacgtgcgagcccggctggaacggaaccaagtgcgaccagccttgcgccaccggtttctatggcgagggctgcagccaccgctgtccgccatgccgcgacgggcatgcctgtaaccatgtcaccggcaagtgtacgcgctgcaacgcgggctggatcggcgaccggtgcgagaccaagtgtagcaatggcacttacggcgaggactgcgccttcgtgtgcgccgactgcggcagcggacactgcgacttccagtcggggcgctgcctgtgcagccctggcgtccacgggccccactgtaacgtgacgtgcccgcccggactccacggcgcggactgtgctcaggcctgcagctgccacgaggacacgtgcgacccggtcactggtgcctgccacctagaaaccaaccagcgcaagggcgtgatgggcgcgggcgcgctgctcgtcctgctcgtctgcctgctgctctcgctgctcggctgctgctgcgcttgccgcggcaaggaccctacgcgccgggagctttcgcttgggaggaagaaggcgccgcaccgactatgcgggcgcttcagtcgcatcagcatgaagctgccccggatcccgctccggaggcagaaactacccaaagtcgtagtggcccaccacgacctggataacacactcaactgcagcttcctggagccaccctcagggctggagcagccctcaccatcctggtcctctcgggcctccttctcctcgtttgacaccactgatgaaggccctgtgtactgtgtaccccatgaggaggcaccagcggagagccgggaccccgaagtccccactgtccctgccgaggcgccggcgccgtcccctgtgcccttgaccacgccagcctccgccgaggaggcgatacccctccccgcgtcctccgacagcgagcggtcggcgtccagcgtggaggggcccggaggggctctgtacgcgcgcgtggcccgacgcgaggcccggccggcccgggcccggggcgagattgggggcctgtcgctgtcgccatcgcccgagcgcaggaaaccgccgccacctgaccccgccaccaagcctaaggtgtcctggatccacggcaagcacagcgccgctgcagctggccgtgcgccctcaccaccgccgccaggctccgaggccgcgcccagccccagcaagaggaaacggacgcccagcgacaaatcggcgcatacggtcgaacacggcagcccccggacccgcgacccaacgccgcggccccccgggctgcccgaggaggcgacagccctcgctgcgccctcgccgcccagggcccgagcgcggggccgcggccccggcctcttggagcccacggacgccggcggtcccccgcgaagcgcgcccgaggctgcctccatgttggccgctgagctgcgcggcaagactcgcagcctgggccgcgccgaggtggccctgggcgcgcagggccccagggaaaagccggcgcccccacagaaagccaagcgctccgtgccgccagcctcgcccgcccgcgcgcccccagcgaccgaaaccccggggcctgagaaggcggcgaccgacttgcccgcgcctgagaccccccggaagaagacccccatccagaagccgccgcgcaagaagagccgggaggcggcgggcgagctgggcagggcgggcgcacccaccctgtagcaggctgtggctcgtccgcgcgcagctccctcagcttcgcagcgccgcccgccaccccacacctcccacgctaccgggcacgggcggcctcctattggccgggcaccgcgcggctagcggaggttgcgtctcattggctcaggtcctgcagccgctcctggattggagcagtgtgctctggcgggaagggcccatcccgttggtcgaggcctgacaggcgcttagcgggcgactccctccccattggccgagttatggagcgctccgaccagacagcgtctcattggccaaagatgggagggttccgcttaaagaccgcctcttactggccaggagtggacttggttagggctaccttctcattggttgcagccagaggcacttctgcccgggctgcctctcccccgctagggcctggtgcctctggctggaggctccctcccttggccgtcccaatagagcccggggctacttccactggccaggctcccgggcatctggttgaccccagcctggggaggagggctggtctccgctcctcaggggcttagtccgtcccaccccttcccttccctggcgccccgggcccaggcccctcagctgtcagctggttttgatggcctcccactgccccacacgccgcgggacctccaggggcgactctagtggcctgaggagatgtatttataggcccccagcagggctgctcccccctcggccggtgccccaggatgggctcctcccggcgggggcttggccaaagctttcttaataaaatgcctttcccctcaaaaaaaaaaaaaaaaaa

SEQ ID NO: 229 - DNA, 31737 bp, Homo sapiens
aattcatctgcttaacagtgacatttttgttgctattaatatatctccatattcattaattttactaaacatcttatttcatttactacactcaatttatcaattgctctaatggcctctaagtatgttagaaagcataattaaagaaaaagttaaaacaaatagcatctttaagccagggtctaacaaagaccccaaaccacattctgagccatgggccaaattccatattagagcccaaactacaactcatcatgttctttgttaacaattaaggtttgaatacccaaacatcagtgcaatgtctatcatgaaagccttcccatggtactcatctcagaggtaagactattacttttacctacagagaagtcgtgtctgaaaataatggaatcctgactgtgatgccaaggcctgggtagtcaggccaaccaagagatacaaaactagcatccccttgcagcacagggtctggcaggcagaacaagtcaaggcagaaagtgatcagatccatgtggatcagctaggcaatgaggagcatccatgattcaaaagtctgagcaggaaggcaaactctcgcctagaaaattcaaagattggcaaaagcaaccagaatgagaagggacaatgatccctgttcatataattgaagctggctgcattctgccctattttatatcagttactagatatgagtgtggagggttcgcgaatatcagccagagccaaaaggagctaagagcctttgtgcatttatctcttgttgctaaaattactacaaataccactggctcaaaaaaattgtcaaatctgacactgttttaacggtaaagtcattcttatctttcttcttatcttgtcatattctattgatttaatcagcaccgccaggcaaaataataacaaagttaaacattagttaatagtgttgcccttagtgactttggaaaagttacttaacatctgtaacctgttccactgtctttaacatgcgggaggtaacaatgcttgtctcatgagatcagaggatgcagcaatgcatgggagcacttggcattgtcctcagatatagtaagcaatcaatgcaagtgagctgctattgttaacagtattttaagtgagaccataagaaaatgacacttttttaggtcaaaatggtctaatattggcaatttcatatggtttgatctaaaatttttatcaatcatcatgatcaatttgttaatattattaataatattgttattgacagatttttgacaccttacggttctattttaggatcccaaatactcaaatttcaattgcaaaatgtagacaaatagaaattactccattgcaaatggctatctgtttatccatctatctatttatctgtctacctttctaaaaagatgtgtcaggaataaagaaagccagcatacatcaggatataaggatgttacacgtggctgagctgaccacagatttttttggcacatagtttaaccatttgagccatcatcatatttatgacactgtctgaggctctggagcataaaatggaattccaaattaaggaaagtcaaattaaaatatgaatatttagaaatccctaaaggaagaattgcaaaaacactaagctgaaggaaataaaatgaggcccaaggcaggaaagagagtataaaaatatgagactttaaaaaagtacatacatatataaggcatgaatcttagaagatacagttttaaaaaaaattagtctcataatactaaaatagaaccatctcctgctcgtgttctgaaaaacataaatctatacatatagtatgtacagatgcaaaactattagtttccaaagaggttatcagtgacagagctctgatttgtggccatgatcctagtgatggaggtatggtgatccatccgtattctctcatatggcacccctcatgcccaagggcctgcaactgtcaggtgaggagccacgttaaaagatcagacttaggccacggaatgagcaaacagacacgcacaggattccagcctatgacctttccctcattagggaattccctgccctaatcatacactaatggtgctaaaacatgtattcaaaataccatcacccttatggttcagtactttaataagcacacttagttcaggctgctataacaaagtaccataggcaggtagctaacacacaacagaaattgatttctcatagttctagtggctggaagtccaagatctggggagccaatatggtcaggtttcggttaggactcttttccaggttgcagactgcctattcctcattctatcctctcatggcagaaagcaaactaactctccaccctcttcttttaaggaagggcacactaatcccattcatgacagttccacactccgcatctaattttgtcccaagggtcccgcctccaaataccgtgaccttgggggttggagttcaacatgtgaattttggggatacaaatattcaatctattgcacactcatacatttatatctctttttgaaattcagtgagaactttgtctcgatatgaaatgtacaataaaagcaggagtccttcccgtctcttgatattatgtccacaatgattcaaataagccaatttacagaataaatcagacctagtcatcaatactgaacagcattcttgtcaagggctctggagtcaagactgcctgaatttaaatcctggccttggtagctataggattcttaaacaaattacattatctttctgtgcctcactttcatcatccataaatgggggataccaatacgcttgcttcataggattcttgtgagaattaaatgagctaatatataaaaagcatagcgtatttggcatatggcaaatgtttaagaaatggtaacaattagcattattatagtaattatttctggccatttctataccaataatgataaatatggaaaatgaaaaatgaaatttataaagaatcatcatatatgaagataaattaaaagtataaacataatcatttaggccgggcatagtggttcatgcctgtaatgccagcactttgggaggccaaagtgggcagatcacttgaggtcaggaatttgagaccagcctggccaacatggcgaaacccgatctctactaaaaatacaaaaaaaaaaaaaaaatcatttatacatttgcacaatatattaagaaacttaacattattttgtactaatatatcatatatcaactatttttgaaaattctctcactactctagtcatcagtgatcaagaagaacattaagaaaaatcaaagaaagtaaataaagaataggaaacaacattaaccagtttcctataaataagaagtcccctgaatttcatctcaacaaaagctaccctggcaaccttccaggagtccagtgcctgtacaaattatgcataataatttatgtaaagcaggcttcttttttttcctcttgagataacagaagatagttctatctctttgtgagcagggaccttttattttttactttgtcttctaagattcacttttcatattgcttttttctttcatggtttttgtttatatgttttccccttttgatctcattttatttttcttacagatggtcgtttaactagctcttccttttagatattcttattcaacttttcttaatttcacatccaattttatgcatcagggcctaggacactgccttgaacataatagatactccactatttgttaaataaatgtaacaaagcacctgtggtcagcccagccatttgcaacattcttacaaatggatgcatgctagttgtcattgctactaatatattttcaccatttctattgaccatatttcagaattgaaatatgccttctaatctatatcgctcatgtatacttactatcataatgctcaacagagttaggaaagaagtttatctacaaaaaataaatatgcaatgttttttaaaagacacagacttttaaagaacctaaagacaatgacataatattaaataacaaatacacatatcaaaattttggacccagaaacactcttgttatacatattttttattttaatacatataaaacataaaatatccttaggaactttttcttcaaggaccgtaatcatgagaggtgtcctataaggtacagtaataactaaaggagcaaagataagagaagacaagatatcttgtttattcaaatgatggagttctggatcatgggatgatctcatattgtctttttaaaaacactaatttcttcatacaaagaatatttcatttggtgatttgccaagaagtccgcttttagaaaaaaaagctaaaaggaaaatatttcaaaagaatgacaattatgttgggtaatttatccttaatcttaaatactttataaattaataaatggtactacaaaaaagtacaaaaactaaacatgtacacacattataaatcttttttaattttctttttaggcctagagggtatatggtatagcgtgaatacaggctttgcaaccagaagaccttagttctgatcccacctttgcctctttactccttagactatcaagataattaaacgaaattatatagataatatatttagtgcagtgcctgacacacagtaagaactcagtgattaataataccattactaattttttttaaaaaaggaattaaaagaaggcacattgaatatctatttagtcttgctccctcccaaagttctactagaaaataatgggattaaagataaagaagtccacaaatataatggaaaaaaggaaaaaaatcagtaaaaacaaaattctagcaggtggaaaacagatagatatgtcataactagtggagaaagctgaatcctacgtccactgcaggactcttagctgtaccattttaaaccaaaatttactcccaaaaaattgaattattttttgtggttttattacattaaagcatccctgtctttaaaacgtcagctaagcaaaaaagatttcttaaggattacatatgaaaactgtaatccattgcttcaaatattttgacgacgttagagaaaatgattctaatatatttcaattttttaaactgcagaaattaaaaaatatgactagggttaggcagcataaccaacaaaacaaaatatggggttacaaaggctttcaggatagactattaaatcaattaaccactaaactgacagtcatcaaagagcaaattaggctcaacaagtaagatttttataattatatgttttataacatataaacatataattatatgttttttataattatatgttccagttcccagcaccaaaacatgtacacaccaaggggtgaaaacctagagaggaataggggaaggaaaagatgtgtgctttcaagggccatgaccggtgattctcatacagcacacaccgctttgttcctgttgagaagtactagtctacaaaatacaggctgtcttcccagctgtaaaattcagggatgctctctatcttgcactacaaatgggggtataaactggttcaaacaatttggagaacaatttagtaatagctagtaaggtttaaggtatgtatatcttattactcagaaattccactcttaaaaatatatccttaaaaaaactcttgcatatgtacacaaggaaatatttacagaaacattcataggaacattggcatataggaacaacatattgccaaaacattaaaaacaatgaaatatccattaacagaaaaagagataaacagatgatggtatattcacataatggacagcagtgaaaatgagtgaatgctacatgcatcaacatgaattaatctcacaaacaattttgagctaaacagagctgccaaggaatacatacagtataatatcatttacatgaagtttaagaccatacaatactataaatatctatcttagcgcaacatgcaaatgtagtaaaagttgttaagtaagaaagtgagaagcagcatatttaaacagcagagttactactggggctgaagacaaagaaatgaaatcaataggggtaatatgaggactaatatacttaactttttatgctaggtactgtgaatatggggttctagcacattaaattttacatccttttgcatgtacttttatgttttaattaatctacagcaaaattttaaatctgaaataaaaattttgagattctctagctttgtagcactacatgttgaaagcatgaaagcaaataaaccaaggatgatttcatcatcatgtactttatctaaacataaagagttgatgaataataactccatgccatgatgacaatgcaatactgcattctctcataaagccaatctcatccagctcttcattccactatcactgctaaggttatgcctcatcatcctctcctcatctaccacctccaactggtctcctcacctttggtctcttcccacctccgatctggactctacattgtccccacttactggcttaaaatatgatgtcaaaataaggcatgaatgggagaacttaaaagatcaaaattcttgccagtgttctagatgtcatagtcagtgataggttcataggatttccttgcattattagtatataaataacaataaaatgacaaaggatgtcatggagcaaaaaatatgattaatataattctgtatacctaagatctatttttttaaaaataacaacaataatggtaccaacctacttctccaggctactctcccttcccccatggatccattccctctatccatgctagcagatagagaaggacaattaacaaaataaatacataaaatatacagtatgttacacagtgaaaacttattttgtttactgactaattgtcccctctggaatgtaagttccatgagggcaagaattttttcattgctgtaggataccctataacaccacttagaaaacacctagaagacaatctgacacatagtaggtaattgataactatttgctgagaatgagtgaatgaacaatacatgacaaaatagtgctcaataaatggaaactgttactgacattatcattgtatctgtagtgcaggcttcatttgtccacaggaaaatgagttttggaaaggcgaaaataccttgccttcaacaatgctggaattaaaacaaaaacttaggtctagagtctagacctccatcaagtgatttttataacttggactactcagtttcttatgttatattaaatgaggctaggcaatgtcattccacacatttcagggtgtcttacaaagtgcaatttttaaacattttttcctataatttaaaagaaatttaggccaagtgaaatcaagtgacctgtctgaagttagatgcattaaagcctagttcagaattcttagactcagaatatcattttaggctcaatgcttactgtctaccatcattatggtttataccattccatgtcctttcatctactgctcaactttaccaccaagttaaccagcaatatattaatcacttttgaccaaataccaaatagtaaatatcaaggcaagacttctggcagctcaccaaaagaggagacagggcaacagaagttagaaccatgcacaagtaaaaaaataaataaataaataaattttttaaaaagtcaagcttgtttttgcttgtcccaaaacatatcaaaaagaaatgataaatgtatgaggtaatggatatgctaaataccatggtttgattttcacacaatatatacatgtatcaaaacatcacagtataccccatacataagtataattattatgtgttaataaaaactaaataaatgaataaaattaaaaatgacaatagaaggaaagtagtctaacaagaccaatgaaagtgggaaacaaggacagtgaaaatgactctatcaagtggaatcagatttttaatagcacaactgctacttttttctgtgagctatcttactttccaaagttttaaaccctatcgtctggttattttagccaatattttgatgtactagaagtgctactaagttgggtaaagaactgaaagaaatgtagggcagtgagcttaaaaactcagttggacatcagatccaaggcattccagtttactaggactatgccacaaatactaaacaaaggctttcaaacaaatactgtgtcccagcaatctgagtaaggtgctaatttcatagaaaccatgtccgacactattctttttgttaagtttacgctggtttcaacttcaccactaacctttctcaagctgtagtttggtctgtgcttcataacctttcttttgtgttcgatactgctcttgaagatcttcaaacttctcaacaaagccattgtgcttagctcactttgatatcttttcagcatctggtaatattaaacttcttcaaattcctttctttttgagcttccctgactagtactttttgggttttcccatgctatgattttatttttctttaaatactccttttccttccatctgttaactgtgattattctacaaaacacagtccctgatgaatagactgtattccatggttttaaccaacagctccacatagctgactcttaaatctctggttccaatccctgtctctattatccattccaggctatcatcaaaagagaatacttatctggccaattgtcacctcaatctaaatatgcccaaagctgaacttgcctccttcaaaccatcccttcaatcaaaccaattccctttctcaacttctctgtcttctatcaatggcaccacagctctctcagcaactaaagcatagatcttcagtcacctttgcccattctgtctccttcagtccattaaggcactgaaatctttacttaggcacccaaaattaggacatgacctgcaaaaataagaaaacagaaaaatgccaacacaatagaaaagcaattaaagaaaaatagtttgaagattaaaatattgggatttcccacgttgctagaatttgaaaacagaatatctgaagtaggcgccgtgtaaaaattcagatgttggtaatcatatacatccaattatctttagccatttttgcctttacagacatcccttcctctctactcaccaataccactgctctagttcacactttcattacctcacatctcaacaaatcttgcctctcttccagtccattttgtccttccgcctctgacatcaatcatgctaaagcatatcatttattatgtcattcacttagccaaaaaccttcagggattcctcaaactacttggtctgacatataatcttatattccactcctggttttggaaagccctcccacttcagatacatcctcacactttacaaactgaaagcacccgtgcaagtatgagatcaagaagaccactggtagatccaaacttatctacagcttcctttttgttctctttctctccacatgttttcctccttgtaacttttcttcttttctaccactttcttatactcattgtcttttccacattcttctttatgccaatgttaccagcaagaatttataatcactagtaacgccaagaactaaagagattattgatcactattctaatcaataattaccaacaaaaaagactcagacataacagaatggaaagtagaaggaaggagacgttggttgtagaataaccattgtccaaggttctcagtgcaattctaaaataaggttagaagtgaggccaaacaagttctcaaatcttatgatgggggcctcactgagtggtgaagatgccttgctgtccatttattcaggaatatagaagtagcataaacataacttcttccagttatagttttctagattttttcccctatatttcatcagaagctacacagggccttgggttttcctccactgaagatacatatctacagaaaagaactctgttggctaatgtcttcaatataaaattaaggaacctgggaaatttttcaacatcaaactaaggctatcttgtctttatacaggctgtgcttagctgggttaaaaaaaaaaaaaacagactctgtctttcttaaatctcacattttaactgcatttccttaggccatatttgcatcttcaaaggaaaataaatgttctttcccatttcgtaaaatgttgtttttcacagaaaagaaacaaaccaacaattctcactatactcacaaatatttaaagctttaacctgagatctatgggtttcacacacacacacacacacacacacacacacaaatgaaactgctcttgattgcaaatgtacacacacatagacacaatccactcctttctccattgtccccaatactttttactcttaaggaggagagaagaatcagtttaattgaaatctagatattttaaaacttctcccttcctttgtctcttctctcaatgaaggaaaaattaagagatctatggaaaagggaagctcatttgtatgctgatggtatatttgtgcaagaatgcaaaaaatagaaaaggagtataaggtgactttcaggtaaatcaactgtgtttccatttagattcctcttcctttcagtttctggcatctaacttaaacataccaatccttcctagggaaaaagaactcaaaacatttataacctttcactgttcagtaccagtccagagaactggatgtgtgcccttattcagagccctgccctaagcaaaatgtaaaatgtttggtttatgttggcaaaaatctattttctctttatgttcttcacccttccccttctctttgattatatgtcgcagaaatctggcactctgcacagtccttgggaataatttctaatggtagaatgatagatactatattatgatggaataaggagttatttcttgaaataatgtttattaagcaccattatagacaatttgaaccttccttgaaatgctaatcattgttcctggagaaaaaaattctgtaatcaaaagttttttaacactggatgaagcaggctcctcagcacctttaatatgctaataagtaccaccaccctccccctcccctgtacctgctccctaaaaagcagccctgacatacaggaattcccaaacttacttgaccagcactactttcaatgaacatctatttagtactccacaaaataatctgagaacagttgtgcttggagaattcagagcaggtagacagcatttatgctggagtggaagaattaaatatagcctcgtaaaagagtatttgagccaggtactgaaggataggtaaaatttaactgtgcagaaataagaagaaaggcaaaaaggatgccaaatgtgtctcaagtccctcacttttttctctctctctctcttttttaatttcaatagtttttggggaacaggtggtatttcattatatagataagttccttagtggtgatttctgagattctggtgcacccattgtggtgcaactgagcagtgtacactgcacccaatgtgtagtcttttatccctcaccctccttctaccctaccccctgaatcccgaaagtccattgtatcattcttatgcctttgcatcctcatagcttagctcccatttataagtgagagcatacgatgtttggttctccattcctgagttacttcacttagaataatggtctccaactccatccaagttgctgtgaatgccattatttcattccttttcatggctgagtagtattccatggtatgtgtttatataccattatgtggtgtatatatatggtatatacatatatatatacacatatatacatatatacacgtatacatacacatatatatacacatatacgtatggtatataccatatatatggtatataccgtgtgtgtatatatacatatatatacacatacatacatatgtgtgtgtatatatatacacatacatacatatgtgtgtgtatatatatacacatacatacatatgtgtgtgtgtatatatacacatacatacatatgtgtgtgtatatatatacacatacatatatgtgtgtgtgtgtgtgtgtgtatatacaccacatcatcttcatccactcgttgatagataggcatttgggctggttccatatttttgcaattgtgaattgtgctgccataaacatgcatgtgcgagtgtctttttcatataacgacaagtccgtcactttgaatcatccacctatttcacttatgctgaagctagttcactctggcctatgctccagatttaacctgatccggggcagtatctactgttcagatcccatcaggacccagctgtccagataggcatgaagacatagctctgtagatgaggggaaggcaatgaaatgagatgttaggtgggaaaagaaaggcagtttctaggccataaaaggttgtaagccccttccaaatattttcttaactcaacattcttttgatctaagcaagttaatatatcccgtcagttgcagtttttaaaagataaaacgcctaatagtaaaagatctttacttttctatgtctctataaacaaaatttaccaaatatgtagactataccattggtgcattttacttgtttcagatgtagtgatctgtactgtcaagttgtcaaaacttattttctagaataaagtagatgtaaaacgtatgcagaatgttccattgaatcaaatgtaccaacttcacttctgaatctctgaggcaagggttatcagagagtaatatttttgaattcagaaataaaaactttggcttaaatgcatgcatgaaaccaaatcaatgggctaaactttgttatagaagtatgagaggattatttattagtgttcacagaacatcgctaatttttttaaattttatctggttatagaagtaatgcaggccaggcacaatggcccacacctgtaatcccagcactttgggtggctgaggcaggtggatcatctgagttcaggagtttgagaccaacctggccaaaatggtgaaaccctgtctctactaaaaatacaaaacttagctgggcatggtggcacgcacctgtagtcccagctactcaggaggctgaggaacaagaatcacttcaacccaggaggaagaggttgcagtgagccaagactgtgccactgcactccggcctggatgacagagtgaggctctgtctcaaaaaaaataaaataaaataaagtaatgcatatttttttaaacttgaaaatgtaaaagaaccaaagaaaaaaaattaaaacttaactagagatagctgttatttaaataatttctttaatattaaaagctaattgcctctccataatttgggggatgtaaaattgaattttctaattgtaataaaatagaaataacataaaatttgccatcttaaccatttctaagtgttcagtggctttaagtacatgaaataaatatttgacatccagaaaacagggttttctctagccagttcaaaaaaataatacctgctagacaacaacaaaaaagtaccaaagaggacaaaaggaatatccctgtagaatatttaagtaacatattaacaagaaattctgttctggaaggacaagtgctatatacataatagacattataaacatcacctactttattataaggttggcaaggactttctcacattcaggcttcttcactttcctgctaaatgcagccatgtactagcggtgtagaaccctaatttagcatgtgctacctgtaatcacggtgttagaaatcctggccagctgcccccctccctgatgtcacacactaaacacttcctctaaggctacttgccaagcaatcccacctttccagggaaagggagaacaccctgtctttgcatactctcttggttaaagccttgcagactctcatagactgaatgcaaggctccaaaaaaaaatgctcctattaaacgttttctattaaaatcaagcagtgtgtaactacacagccagagacctttctaggatcagtcatttcaaaacagcaagcacaaagaagactatttctgaaatcacacccgcaatttcagcctcctatgaaaagtacctagacgttctcagcccagaatgcaatgcttctgagtcctcctggtataaagcagcaatactgccaatttcattttatgaagaaagaaaaaggaacaatggtttaaatcccttgtctaaagttacttggaaatcacagtgacaacttaggaaaggaacagttaggaaggatcaaattctctttgacccaattaatgcacaattatatttaagaaagaaaagaggaaggtgggaaaaggggagaaagaaccgttcttggcagcagattaccaccaaagggccaaagcctcacatacacttggataagtatccagtgcagaggcccaaagacatgaacatctttaggcagctaaagagcatggaaggcgctaacatcgtgagctgagaaaaaagcaccctcatcaaaatctgaagcagaagccagctctagagaatagcaatgccatagtccagaggaacctgctttgggattgaagtaataaaatgatgcccactcagtgccacaccaagtgcctggcaagccctgggtgttcaccaagtcttgcttctccctttgcccatttgcacacaagcctgttgcaacgtttttacagctgcccacaggctttataggtggtctactattttttgactgaagaattatcatttgctatgatcctattaagtggaagggaaggcactgagtctactctgaggactctggggcttagagagcttaagttactttcctgaggttctctaggtagaacgtcacagagccaagattcagaaccatatctatctagctctcaagcccataccttttccacacttccactgtgctaacctcacagagagcacaattaagaatattcaatttaagctcatagagagactgatctcattaatatattaaaacaggagttgggaaactttttctgtaaagagccagatagagaatattttaggctttttgagtcacataggttttctgttgaatattcatttttgttttctcttactctctaaaaacataaaaaccattcttagctcatgaggctatacaaaaactggccacaggccatagtttgtcaagccctatgttagaaaacacaatccaagcaaggctcaatgattctgatggatgaggactgtagtgctgattactcacagacatcttgattcactacagtgtctttcatttcaagacggggagaaaagagggggatagaagagaatcagtattcagtctagtcacttcatatacattccattcttaaagtggccccgtacttagaccccttcattagagtagtctgacaagctatcaggcatttatttcatttgtttccactatttccatgcctttgcatattccagcttaggcattaatctgtcactgaaaatcaaatgctttcttcagtgtaattagaattgactgcttcacagggccataacataatgaatagaaactgagggagatttaagctgaccatgggctctttcagtatgatcaaaggcctctggggctctattatttgaaattacagaaaatattttccgttcattttatgacacttgtaaaacaggcttttgaatatccctgaaatctgcaaccaccatcaagtcaacctaacagatgttgcaaactggatccaggtcatcaacatgagagagcataatgaggagcattttaaacgacattcagattttgctatgcaaggcaaaataatatacaatttatgacctccttaattttctttttagatactgaactctcatccaggatttgctggcaggtcatccgtaagcaaatgctagtagctatgtgccctgtcagttggctggctgacctctgtattgccttggtctgggcaatacaactttggtgccaagtccaaatgtttctggttaaaatattttcaactctgctgattcatgcccagctgcttggtaactacagagtggaaaaagaaggtggccaccagggaccaatttaatatcaacaaatgttattcccattgctgagctaaaccagttggaaaccagaagactccagattccaaaggatggtaacttatttcataaggctacatgtggaaccacattgcccatcttaggggcaaatacatacaggctgattttaatcacaggaacagctagcaaattgaaacaggagtgagagcaataaaagcagctcccttcttggatttgtataatcacctcttgagggacaggacagtcaggatgaagacctggcccaagacctactaacacacattaagcagagactgggagaaaagtgaccaactgcaaaagccaattatagaggtgcagtcaagcaaggaaatgctttcctgtatatgaagggcatagtaatatcagtcatgatgcaagacaccaagcagggatggcagataaaggaaaggaattaagatgtgaattcctcctaagggctcagaagcacgctagatattttacatacagtatatcatataaccattacaaacttgtaagataagaaacagtaccctctttttacctctgaagaactgaggattggagagaaacatacctaagattagaagtaagatgtgccaggcctagcattacagctaggtctgtcagggatcaaatttgcctttttcattccaccaggcttcatgcccctcaaaaaagtaccaaaacacaggatggagtaaataacattcagaagtcagataagcaggtggcattggtaagcagcagggctctaagctcaagccaggactctactgtcccactggagagatggtaagagcaagcaaggacacaagtgctatatctagtaatgatgtcatacttggtaccaataaccttcacaaagtcagctcccaaggcccactgctatcaaagtgaagctagaagtcagggcacaaagtagagagtggggagagctgaggctccgtgggcaccatgagagtccaggaggtcatctgtctggaaatatactctgaactcccacaacggaggggttgaagctatttaaataccatttggagccagacattgtcttggctccaaattggcctgaaaactaaagttgagccttcagttaagaaactccatgtagggaggaagagggaggtaaaggcaggacttatgaggtagggatgggaattttttttacttcagagccatgccaaatataatcaatttccttggcatttcttcatctataaaattgccatcatggcactgttaatggccttcacttcaggccaatcaaaggaagaggaaatcaggataataatctaagcaattcaagaaaaaaaaatatattttgccagaattagatcagaactttacatttccaaacagcagcctcatgctggcagagctggacctcgggagcagattctgggacgcttgctggtgccaggcacagtgacattagcacctggcagcccttccctgcctggcagtgcacgcacccttctgtggcaactgccagcacttctctactcaagtcatctaatcagttcccagatcatatgggggtaggggaagaaagctggcatcagagcaatgaggagagggacaggtgaccaggaaggtagaatgccccacagtgaccctcctctcctcttcagaaaggggctgctctacaaagatgggaggagggaagagatcacataattcaacccctgattcactaggctgtgaagagagatccagctgagtgcactagactaactgattaatcagttcccttctctgctctgtgagggaagccactgtctcgaggcacataattacatgctgagtgtcctcaggtgcctgaaggtgacagccaggctgggcagagctttgagtctggctctttggggctggctgcttctcctcccaggtcaagtgatgccactgctcccagtctgaaaatgagccagctggggtcaaagagcagggttggaaagggaggccccccagctataggccagggctcctcaggctgccactatcaggactctaccatgttacctgcactgcagctcttatgaagcccagcttccctcacccaccacacacacacacacacacacacacacacacacacacacaggaaaatcctggcactgcagctcttatgaagcccagcttccctcacccaccacacatgcacgcacacacacacacacacacacacacacacacagaggaaaatcctggcaaagggcagttggaacaaccagattcttccctcttagcctcagttagctcaaaggggaaaacagagttgattaagcagaaaatcttagaaaatctaaattactacaccaacaaggcactgctgccaattcagtgtagataaatcagctttctcagtaagataaacaggcaatgtgaaaaagatcaattgtttcagatacaaaagattaactaaaagagattttccaatagaagagttaaaaataaatccaaagaagttttctgatcagacagtagtcaatcctcgtcataacactctcccagaaaacagatcacatgattgatattatcatctcatagtctttataaacaaaaaaaattctttagacattaatttctaaaactcccttaattctaaaccaaatgtctactacccttattctcagtagaaacaaagtcaagtcatcattcacaaaaaaaaaaaaaagtgcccaagcaggaattcttttacctcaatctattattctccaaaataaaagcaatcccaattcataaatgtttcctcaactctttcactattttcattttttttcctgaaactccctccaaactaaccatgagctcaggactgatcatttattggacaatgcagctgctgacagctttcactaagtgatagtggcttttcttccaggtgcgttatccacatcagataccagttaatgttctgtttttgtctgtctttattccaaatagtggtcccaatataaaacaaagaagaatatggaagaaagaaaagcaattggcattggaaactcaataaatgtctaagttaatttgtagggcgcctgaaaaataatccacttgaaatttaaatcaaaatgtagcaaggtaggaaatggtgcatggctatacaatataaactaccaaaattataaaaatctgtcaataattgcatatgacattgatgattaataacttgtcagcaatatagcttgcagaattgttatgggaggaactgattcattgaaggtgggtgcctacttgtttaaatgcccatatgctaccaaagttaagtaaaaaaatgttcatccagagtgattttcctaaaatcatcaccaaatgttttaatctcaaaccaaatcaggggaaattgcttttctttacataatcctacatgtcctagaccagtggctctcaactttggctgcacactggaatcaccagaggagttttaaaaacttgatgcctcggccccatcttcagagattctgatgtaactggtctagacgtggcctggatattaggatttctttttctttctttctctttctttcctttctctcttttctttctttctttctttccctctctttctttccttctctttctttctctctctctttctttcttccttcctccctttccttcctttccttccctcccttccttctttccttctttctttcttttctttttctttctctttgctctctttctgtcctctctcccctcctctctctctctctttctttctttctttctttctttttcagagaccaagaggtcttactatgttgctcaggctacattcgaattctgagctcaggcaatcctccccgctcagcctctcaagaagctgggtctacagcccgccactgtgccaagatgttacttcgatttttaaaagctgtccgggtgattctaacatgcagctaaggtggggattcattgccttagacaatattatgacatatcaataaaagtatgtattgcaagcttactgtgtaccaacaattgtgaatagttgaataaacagaaaagtgtagcacagactctgccctccagaccctagatctaaggggaagaaagacatgtaatagaacagttattacatgtctgagatgtacagagcaatgaagggtgctctgcaggggggcatctttacacaacctggcagagaaagtcagggatggcttcccaagcactatgatcaggctgggtcttgtaagctaagtatgagtcaaccaggagaaggaagtggggaaaggcatttcaagaagaaggtttagaatgtgcaaaggtccagaggctagagagcacagcccctaccttggatctctgaaagttgttctacagataaggcagacagtggatataaacacaagaaagaaataaggctggagtagttttccagggtacctagagggctcagactagtaatgcaaatgggccaagcaggctgagtgtgagacatcagttggtatggcaaactgtcaaaccgaggatgtcacagggggcagggggtggttcttgttgttgcttttttccagccatggcaagaatatgggctcaatattgacatattttgcagattttcaagagatgctgagaatctggtccttatgtgaaacttacaggtttttaaatgctgagcagaacaaataagtctgcaggccagattctgcctatgggctacaggtatgggctacacctttaactactgacagatttaaaggtgggggaggtagaatccaatttagattcaagttcatttttattttattttatttttgaggtggagtctcactctgtcgcccaggctggagtgcaacggcatgatctcggctcactgcaacctccgtctcctgggttcaagcgaatctgctgcctcagcctcccgagtagctgggattacaggcacctgccaccacacctgactaatttttgtatttttagcagagacaggatatcaccatattgaccaagctggtcttgaactcctgacctcaagtgatccacctgcctcggcttcccaaagtcctgggattacaggcatgagccactgcacccggcctcaagtacatttttaaatgtaaagttgaacagcagtgtggcagacagcagtgtaataagcataatagtacaaagttttccccagtaatcctagtggaggtaccactgttctgaagttcgtcccctactttttcacttctcaaatttaatacaggaattattactttcaataatagaagaaaaaaacaatttggcaaatattaagatgcagataaaaagcacacttattagacttcaaagtgatataaattacactcagtactgaattacatacgccagtggaatacagaggtagtaataaaaaatcacagatgatctgcctagctgggctagggctctaggccctgagcagcaatcctctgtaggctgggaacatagccagcttcccaagcagggcagcctgacagcaggaggtggagaacccagatgccaggagaaggtcacactgtctccagagagtatttcccttcctccatttgagtcccacctcaaactcctccccaaggtcaatttcccaaacgtgaggaaggaggcagatcccttacatgtgatgatcagtcatcagtactataggggctaaccacaaatgtgcatcctccacacactctaagaaactgggatccatttaaagtcacaaggcaaagctagagtgtacattagcccccatgtatggcaattagagcacagaaagaaaggtatttatttgtgtaaatttggcaaaacatttcacaaacatagttatctataaacaaaattaggaaattataacatttgagtgacctaatagatttgtttagggaaaaataaaattctaaataagaaaatgagcaatggtaaggaatacatcacagacacatggctacaactaattctcaaacaaaataaatgggcagaggtactgtccaaagaaagactatttattcagtaaagaactaatgcttgatttttttcttcaggttttctcaaaaagagaaaacatataattaccatgtctggtaaaaggcctgtagcctctgcatgtcatttctaattttagatatggaaatgggattctctgaggcattctgactttcaaagatgggttactgaactttgaaatattaaatctctggaagcttaaacaataacattcataattcaacaaaaacaatgatcctttctttgacagggaggaggttttttaaaagttaaattatagttaacaatctcagccgggcatggtggctcacgcctgtaatcccagcactttgagaggctgaggtgggcggatcacgagatcaggagatcgagaccatcctggctaacacggtgaaaccccgtctctactaaaaatagaaaaaaaaaaaagaaaaaaaattagctgggcgtggtggcgggcgcctgtagtcccagatactcaggaggctgaggcaggagaatggtgtgaatctgggaggcgcagcttgcagtgagcggagattgcgccactgtactccatcctgggcgacagagcgagactccgtctcaaaaaatgaataaataaataaataaattacatttaataatctctatgctaagtgtctctcagtctcagtttttaaagattaaatactacgtaaactcaaaaaagatgtctaaacacaggaggaaaaatacctttgaatgtgaaggctcaaagcttaacttgaaaaactgctctctatccatcaactgtcatgcataattaaatagctaaataaagaaataacagcagtaaaaattattagaagagattgtttattagcaaaaaataaataaacaaagtcatctaagtggagccataaggcatgtctacatatattagtatgaacacttttcattgttttatctaaacttgtctgacataccattttaattttttcttgattcagaaattatttgtgcaaaaattaccagtgatctctctaaaatatgacatttctaagtggagccataaggcatgtctacatatattagtatgaacacttttcattgttttatctaaacttgtctgacataccattttaattttttcttgattcagaaattatttgtgcaaaaattaccagtgatctctctaaaatatgacatttcttaatttctgaggttattattcagagaaaataattttgattaagcaaatcatcagatgctggaataaggatggtcctgtcaaagagagaagattagactaatgacaccacatagaaaagaaggaaagtgaatggtatgagcatatgactgcctactttcgggggaggggagaacatctctttctactgctcctggtttatcttttgagttagcaccctaaatgtcccttatgcatattttacactgagatggtgagttaaccttaggattcgccttaatgctgcagccagaccagctggccagcactgtttcttccattttcacctctttgagctttctggagtatccaggtatcttgaagttaatccatgaagggaatttcgccaatctctatcttaatagagtccatggtctatctcccaagactctgtacagccacaccagtgacatgagtagtgagatttttaattcaaaaaaatatttaattgtgcctggttttttcaccaaaacactgtatttgcctctttaaaaaaagtaccttttaaaaagtactctgccccaggagttttattgcttttgccaagataaaagtgaaatttaaactcaggtcttcatgaattttcaaagcccatgctctttctactataccacactgtctcctagtataactttattaggcatatttaaaatttacagtataaataaactacgaatatgtgtgtatccacatgcatgtcttcctcaatgcatctgccactcacttgccctaccacaagaatgctctgagggctgaaaaagaacgtgagaatgaagtacccagcccggcgctcaataaacattagtgttcttcctaacgatcaaatgagaccctgttgtctaccttttcaaaataaaaacgttctaacacagagtaaattgctcacttgcatggagtcacatcaacaccatgaaacctcagttccaagccggattgtaggtttctagccacttgttcagctggcattccacaacctagttatataatgaccagatccctctctcctaattacatgaccaggtactgtcacagatcactgaccagggttagggacccagggacccagggtgagagaaaggaaggtaaaaccatgagggcagagttgaaagaaaactacagctttctgaaacactgtgaaaccaaaaagactaagatgagcctttcccatgcaaggaggcagttgagaaaggaggagtattatagagttaattcctaggacaagatgtctaagtagaggatgttgggcagaacccgacgtagccaccaagatgactctgtaaagtcataaggaaagcacttctgaagctaagggcttgggtgtggggagctgttgctttcacaaccaaggcaatcgacacaaatagctctgcggcagattaggcggtggctaaaagtaagaagaaacaggaaggaatgctggaaatgactatataagttcaaactatgtatgaaacgaagccatgggaacctatacaacatatataatctgtagataatataaaccccaaacctcccatatatgacagtcaaattacctcaggctgagacactgtgggagaggaaaaatactaaaagggaaatgcactagaggcagggacacagttttaaaaacaaaacaaaacaaaaaactgcagaagtcccctgagtaaaatcaagagagtgcaagttatctcagcataaacaggcaggcactgctctgctggaggactgtgctatgccaagtttcatcacatcagcacaagagctccctggcacatgggaacaaacatagtctgaatcatttgctggtgtgcgcaaaacttagaaaatatagatgattcagctctaaatgttcttcgtcctgtgactggccatggactggtagtcttaaattggacagtttctctgtcccaggttactacttctctagtcctccaacacataaaatccatttacttaacaaatttcgctttgccccaagtgcaaaatgtccttcaaagcaaaggttttatgttcgtattcaggaaaggctgactctggcccttaaatggataaacctcctagataaaaatcaccaatgtttggaatagtctaggtaaatacagcaaaaaacatgaaaaatatctttgctttttccttcatcaatattaaagggcaaaaaattcccgtgtgtgtgtgtgtgtgtgtgtgtgtgtgtgtgtgtgtatcactaaacatttagtaaaccttaccattcccctgttgaaaaatagacctatttatatatctacgttttctcaaataaattctgtaagcttacctatggcaaagcataacactcactgaacaggcttcatatgcagtaatatataaaaaataaaaactttatgcagtcttatttttaaaaaccacagaacatgtgaactggcttgtatttcaaaaatctgtctcatccaagggtgtttaaatgttgcctaaattgttaatcattgttttctacctaaaacaatacagaaaatacatgaaaagtacagaattataaggatgccagaccttccaaatcttagagtacattattaatccaagagagcctaggtgcagaatcagaggtgaagaaccaaatggagcagaaataaaacagcatcttagttgagagttttaaagatatatgacaaatcacctggcttgcaagtgtaattatcattggaattgttaaaataaaaatgaccacaactttggctgttaaaatattacatgctattcaaacaaagaaattaaaagaaaaaagaaaaaaactcagaagatttctccctacataagccaactggcttatggatccaaaacattcttgatatcattttaggttactaagaaaatctacctcaatatatcatgtattttcaatttctccattaaaaaaagtattaatgcttctcagaataggggatttggggaaaaaagtattaaagattttgacaatagctgaaggtcacgaagaattgatataagtagaacataggtctctccctgttttcccaatccaccacacaacagtgacctacagacaggaatgttaatgatacaattaaaagttctctaaaattaaaactgtctaaaggaaaaaagcctcagaagaaatcatgttttaatatgaaacactaaaggctaaaaatggtcacctctaaattgaataatatcctgagataacaataatagacaatttaaacaatttagctgtttttaaaatcagtatgcactttttttcttgaaaaactgaaggaaaatgtggcatgaataaaaaatactattcctttattcatgcatttaacaaatgtttattgactaccaaatgcagaccaagtagtgtcctaggcactgagggtacagcaattaacaaaaagtccctatccttgtgagacttacatactagggaggggagacgtacaatacacaaacaaataaataataggtcaatagatactgagaagcattgagaaaaacccagcacagtaaggtgttgggaagtatcagaaaatagagggcaagtcctattttatatatagtggtaacagaaggcctctctgataggtgacatacaggtagagacccaaagaaagaaaaggggcaagccacgtggataagcaggggaacatgttccaggcaaaatgaatagcaagtgtaaaggtacaggatacgaacatgcaggcatgtctcaaagatactgaggttttggttacagaccaacacaataaagcagtatcacaataaagagagtcacacaaacttggtttcccagtgcaaataaaagttatgtttacactatattgtagtctattaagtgtacaatagcattatgtctaataaaaacaatgtacatatcttaattaaaactagtttattgcttttaaaatgctgataatcaactgagccttcagcaattttgctggtggagggttttgcctcaatgactgatgaaggtggtgattgctgaaagctggggtaggtgtggcaattcttaaaatgaggttgcaatgaaatctgtcatctttcatgaaagatttctctgtagcatatgatgctgtttgatagcattttccccagagtagaacttctttaaaaattggagtcagtcctctctcagcctgccgctgctttatcaacgaagtttatgtaacattctaaatcctttgttgtcatttcaacaatgttcacagcatcttcaccaggatagatcccatttcaagaaaccactttctttgctcatgtataagaagcaactcctcctcatctactaaagtttgatcataatattacagaaattcagctacagaaattcaggctccacttctaattctaattctcttgctattgaacctctcaaggtcatccatgaaggttggaatcaacttcttccaaactcctgttaatgttgatattttgacctcctcccatgaatcacaaatgttcctaatggcatttagaatggtgaatcctttccagaagtttttcaatgtgctttgcccagatccatcagaggaatcactatctatggcagctacagccttacaaaatgtatttcctaaataataagacctgaaagtcaaaactactcctggatccatgggctgcagaatggatgttgtgttagcaggcatgaatacaacattaatttccttgtacatctccattagagctcttgggtgactaggtgtattgtcaatgagcagtaatattttgaaagaaatctttttttctgagcaatagatctcaatagtgagcttaaaatatgcagtaaaccatgctgtgaacagatgtgctatcatccaagctttgttgttccatttcgagagcataagcagactagatctagcaaaatttttaagggccataggtttttttgaaatggcaaataagcattggctacaacctaaagtcaccagctacattatctcttaacaagagagtcagcttgtcctttgaagttttgaagccaggcactgactacttctctctacctacgaaattcttagatggcatcttcctccaggaaggctgttttgcctacaatgaaaatctgttatttagtgtagccaccttcatcaattattttagcaatatcttctgcattatttgctgcttcacctggcatttttgtttgtttgtttgtttttgtttttttagtggagtcttgctctgtcgtccaggctggagtgcaatggcgtgatctcggctcactgcaacctccacctccctggttcaagagattctcctgcctcagcctcccaagtagctaggactacaggcacgcactaccacgcccagctaatttttgtattgttagtagagacggggtttcaccatgttggccaggacggtcttcatctcttgacctcatgatccgcccgccttggcctcccaaagtgctgggattacaggcgtgagccactgtgcccggcccaccttgcactttcacgttgtagagatgacttctttacttacaactcatgaaccaatctctgctaactttcaacttttttctgcagcttcctcacctctctcaggtttcatacaattcaagagagttagggccttgctctggattaggctttagctgaagagaacgttgtggctggtttaatcttctatgcaggccactaaaacttttcccgtattggcaagaaggctgtcttactttcttgtctttcttgtgttcactggagtagcacttttgatttccttcaagaacttttcttttgcattcacaacttggctgtctgttgcaagagccttagcttctgacctgtctcagctttcaacatgccttcctcactaagcttaatcatttctagcttttgatttaaagtgagagacgtgggattcttcctttcacttgaacacttagaggctactgaagagttactaattggcctaatttcaatattgttgtgtctcagggaatagggaggcctaggagagggagagagactgaagaatggtgggtcaatggagtagtcagaacacacacagcatttactaagttcattgtcttctatgggtgtgattcatggtgccccaaaacaataacaatagtaacatcaagtatcactgaccagaaaacaccaggacagatataataataataatgaaaaagtctgatatattgcaaaaattaccaaaatatgacagagacaagaagtaagcacaagctgttggaaaaatggtgccaataatcttgctcaacatggggttgccacgaaccttcaatttgtttaaaaacaaaacaaaacaaaacaaaaaccctgcagcatctgtgaaatgcaatcaagtgcaataaaacaaggtgtacctgtacttggagtgctgaggattagtaaaagtgacagagtgagcatgggagagtggtgtgacatgaggtcattgtgtttaccctagattatccagggtatttggaaataactggcttcagtgagggaaagacaggcaggaagggagagtgaaagaacaggagctacatttccttgaattcctactaagtgcctgataaagcacattatctcttttattccatactcttaccctataaattaggcgtttcacaccaatttatacatctgtttcacagatgagactcagagaagccaggagaaagctagtaaaggggagaatcaaatttaaatgcagatccttcttactccaaagttcaagcccttcgtcatgctcctctgcttcccagagatagccaaagataacagctgagatagccaaagataacaggcagaatactcaaactaattaaggtcccacaaagagcaaagtgaagttgcaccactgacatccttatgattcttctatgtgtacattcttctcagggattcttatttcttttcagatcacccaaaggaagacatttaatgtgctatctgatgtaagagatactttcaaaaattaagggtaatggttagggcaggaaaaaaggtagcagagatgcagcacagaaatacctgtcacagagactaggcagctcattctaccctgccccagaccccacctaacctccagccctctgcagaagcaacctcccaaaaaagagagctataaatatgcaaatccaaaaggaggtgatgatggaggcaagacatgctcgcatgctttcctttgctttactccaattttacatgagggcatttgaccagacatcatatacgtacataaaatgttcaaagaaaagagtagagatttattattttaagcattcccagaccagggttttcctaggctcccaggtttgaatcaggagaaggaagttgagatcaggaactctctggttgctggttggttccatgattcagatttaggggaaatcagttaagggatttccctaagatcaaccttattagggctttctctgggaaaataactagttgaaatcagtagcactgagcactggtttgcaaagccactatgagatcaaagagctacagagaaaacctgggggagccctgtgaggcttcacgaagaggtaagtgggggtaagtttgcagtcttcctaaaagtgaaaaggtaaacaagaataaaattaagcagtgattgaagacaatttactcacctggggaaatgtacttaacgtgtaaatatgatctgtattacttttaaattgttcgatattgtatcaagataaatttgccatataaagttactattaatgttttatcttctaaaccggttctagaaacatgataaaaaggcacccataaagtctcccattttacagctagagaaaatgaggttggtgatgaggcactgcacccaacttacggatcacagtcacaactggggtctgagggttgttttgctaaccctagggcagcggttctcacccaggggcaattttgcccccagcagggtacttggcaatgtctgcagtcagttttgtttgtgggggtgggaagcttggttgccactatcatctaaaggacagaagccagggatgtcctacagtacacaagacagcctccacgacaataaacaaatatccagccccaaatgctaaccgtgttaagaccagatctaaaccctggtctagagttacttagaaaaggggggactgtcttttttaaaaatgacaaactttgaaaaattattttgaaaaaaatgcttattggtggatcggaattttgaagaaaagacataccaatatattatacaatctgctatgtatgtggcactttcccattttcatctttcccagtccttaagtaacatttcttccttcctggaaatcttattccctgtatgggggtgaggctcacctgaagttaaagcagcagcttttatcttcctcaggcaaatatgggctcagtcatgccatactaggtttatcttctcccaggttcagccactgcctcaaatcagatcatttcaccattaccccctgcgtttcctctttctctaaagcaagcttgtccaaccctctacccgtgggccacatgcagcccaggacagctttgaatgaggcctaagcacaaatttgtaaactttcttagaacattctgagattt

SEQ ID NO: 230 - DNA, 31737 bp, Homo sapiens
gaattcagcaacatgattcaaaggcctttaaaacagtcttaccctttggctcagtattgcgacttctaggaggccagcccaaggaaatcatcagacaggtggataaagatttacacacagtgttgtgaaaaatggaatacaactcacatgtccaacaataggggattggtcaaataaattacggtccacccatatgatggtagattatgcaatgatttaaaatgatgtttacagagagtgtttcatgacatgagatacaaaatggtacaaataattcaaatgcaagtatgctttgtaagtgcatagaaaagggactggaaggaaagaggcatgactccccagctccaggacaggattgtggtgctcagcctgcataccgagactgtgaggtgtccgaggcatgggcatggatttccacgcaggcctctgtgcatccgtgtgcactggggcacagttttgtctgtggttatgtgagaaaatgtcttcatgtgtggacataggtgtgaaaacatgtgcagagtatgctctgagtgtgtgcacgtatttcttatgtccaagtcttcatgttcgagcaaagcaattagcaagtgatatggacacttctcagtctgcacaccttgaccgtaaaggggccagcagccattgccccaataaaaaagtgttcagtgccctcggccctcaagctggcccttgccaaggacactgctacacccaagctgggagtccagcagacattatgggatcacaagtggagtaggtctagccctgcgagttgtgattagacgtaatttgaaatctcaagggcctaaaaggagactgcagatgcttcctaaggccctggagggcctggatccatggggctgaggactgaccctcggctcactccgacccagcctgagaactgcccacatgtggcaccatagagggaaggcccacccgcctaccccagtttgaggggagcctgagctctttgcacaggcccacacacttctggcccatatcttccaggcctttctgttcccgttcccaggaggaggccgtgtggtgtggtgattttccactgaggagtgcctgtgctattgccatctccccagggccaggctggctccacctgctggcctggttggcgataagtgggccccacctgttgcccctgccccaggagcaggtgggggcaggccgccgggggtgtgccaggatcctatctggagcacccagcccagatcatggggtgtgaaactccatagacaccccagcaccttccccagagtcacctgaccgggaatcgaaccctgttctcagtcacctgacctgtcttttccctcctccaaggactcaccctcctgcagccaagtcatcctgtccatccctctgcctccaagcttggctgaggctcaactcggcacatgtttgttgagcatctactcaggctctcaggagctccctcagagccaggcccagccacaccgggtctgagtcaccagcagccctcctgaaaaacgagtaagggatgacttagccagttaatggggaaatacccacaaaacccagccaagggtgtgcagactctcaaaaggcagggggaaacaaagagggacagaaggagccggagggcttttctgtgaatagggaagagagaactcggacattccttcaatagcaactttcgaactcccactgcaggcgggcacatgctagatgctggccaccaatgccatctttgcctccttggaacttatagtctagtggggaaatgatattaatcaaagaaaagtaaagttgcaatggcattaggggatttaacccaaaagttcatggtgccaggagagcccgcagagacagtgcttgctctgctccacacctggagggcagcctgcctccgccccacaccacaggcccatgggcctgggtttccagcactgtgttagcatcgcctttcaggccctccaatctcctaacgtcagcacaagccttgatccagagttgtccgcatgctgggtggtcctcccaggcagcgggatgttcctggtgccccccaccccatgcccttttgtagcatcaaagggcttccagacatccccaatgtgaaagacaaaatgcatgttctaacaaaccagccttgagcagagcagcaggtgtggaatgggggctccacagagagcaggggcatctcctggagaaagtgatgtctgcgagagagctgagttcacaagctatggggcagagcgagggtaggggccagacagagggaacggtgagtgccaagggcctggcagagaggcacatggcatgagccaggaagtgcaaggtggccagggtgctacggaggggcctagtgggagatgggaggcagcgtgggccggccttggggacaaaagtcaagttcttgttcctaccctaagggtactggggaaccattgaaggactttaagcagagagtgacatgatgaactctacaacttaacatcccactggttaccatgtggggaaccaatgggagtccaccagagaggagctagcagactgtcgggaggctccacagcagcccaggcctggggccctgactcagaggggcaggtgggcaggagtggacagagtcgagagccatgaaggagcagcctccacgggagagtgtgaggaggcgggacacagggcattgtctatttcagagggaggaaaggagcacttaagagtgggtcagagagacagagccctccatggggagttcagccccagagcctctcactccaggcgtctgtcctgtgggcagagattgtggggaacttcagggaccacctgacctgggctccattaacccactggacgtccaaggagagaatgtaggggatttggggattgaatgcggagaaaattacaccattattttcaccaacgcctaactcaactttctttcagttatgtgtggagacaacaaaccacaaaagtatgtaaaagtacctgtgactttgttagcaatcgaaatcagatattttcatatcattacagttgagaagacatcttgaaatatcaaaaacgctcatccacatcttgaaatatcaaaaacgctcatcccaatgcagaaattattatacaaaaactattagacccgctgctagatcttgtgatgtaaatcactaatgagaagcacatatgttgccatagcacagacttgaagctgagttgcctccacttggcttttccacacgccgcaagcagcctcgatttcacccaccattctcatcagggaggaacaaggcagctggtcaacccatgatggctaataatttggtgatctcaataaaccgctaaaattttggcttatctatcttttattcaggagaaatggaaagaaacaggttttcaaacaatataaattacatatgtttttatgttcagaataaggaattaacaagttgaagtaatgtaatatatttttccttatttgaaattgtcttcattttataatcttcccactttttataactggccacttatagccacatcctctaacttatatacacatcattactaaggcttatttacagcatatttaaaaattgttttattctggttcgtggtcactcactgccaacacctcaagtttttttgtttttgttttggttttgttttgttttttaacagggtctcactctgttgcccaggctggagtgcagtggcataatcatggctcaaagccttgacctcccagtttcaagcaatccacccacctcagcctcctgagtagccaggactacaagtgcacctggctaccaccacccctggctaactttttattttttgtagagacagcatcccactgtgttgtccaggctggtctcaaactcctaaattcaaggggtcctcctgccttggcctcccaaagtgctaggagtacaggcgtgagccaccatgcccagcctgcctcaagatcttggtctttgttttcctaaactggatctgtgtctgagagtcatgtcaaagactctaagctttatatcaccctttctcaaaaagcagagccgtatgcaccaggtattatttggttgcaggatttgggtcggttgcagctttgagtctgggtcccaggtgagaggcgtggcatataatcgtgccatgcaacatgtgcatccttattgcagaagtacacaatcaaaataggttggcacaacgttttctttttttaattctactccagggcgttgtctacatcagtgggagtggagcttatttgcattttgtcagttatagcgacgtggtcacagtgaaacctgagttaggtagcatcctatttccagcttgaaccgtttgtgcccactactgactggctacctgacagatgcccagattgcctttctctgaattaggttctacctgccgagggaaactggttttcaaaaaccctcttcatggtgccctgaatcagcccctgcaccccctatactaagaagcccgagacccactaggaatttgattgaaacaaggcaaatctgaactagctgttagggcattggtaaagagtgaggatggattattgtggaggctccaaatagacacggtcttcctatagcacggatatgaagtggcccaaggtgtctctgctaccccaccttcccttgaggttctccggtcaccctcttctctgctcccacttcccccagccccctacccagggaagaaactatttgctggtgccatttacagtgatgggtgcagcagtatcctttcaaggaaattcatctgtggtgaggggatgtgccctgtccgaaagtgtgaatcacctctgctggaactctgggcactgtaacatgcaatcaggggctctttggagaagagacgtctgcatacacctcgaggaatacagtctgcctgtctgtagggttggccctccctccaagccctgatccttcttgagaaagactctggcttcctaacttcccacgatctctatcagtaaggtaggtatcctacgagcggccccttgccctgttccctgggagagaggacatgacccaggaagtctccaagtacaggctgtgcctggggaagaggagccggccggggctgaggaaccagaggagttagcgcaggaaggcttcctgggggaagagggagcagccctgggcccctcaccagtactgccccgaacattccataggcattcagaaacttctgcaacctgaccctcctgcccactcatacacataccttatgttcctggcccctgaatgtaagttcatcccattctgctggctgcttccctgtccagaacgcctcctacccacctcgcttctctgatattcttgtgatagcctccacggagctgctgggcactcaacccactcaaggcttctcccacggccgctctccagacctggctgtgcagttgtcctcgagactgttcttcagtgtccatgcctcctccttctcctgttacccacagtgcaaggggaatcagacttcttgaaggtcacagcttccttccctagctcagagaattggggcaaagagttggaaatggcgaccagatgtggggacagtagtgactgtaaatggaagaactcctgtgtcagacaagcctgggactgcaccctggctccctgtttcccagctgggccctcttgaaacagcctttcccttctctgagcctcagtcttctcatccacaaaataggactacccgtatttgaaagtgttttgcaaactgcaaaatactgaatatcagaatggagatcattactcagaaatggctggccccatggatagatagacaagtgagtgaattccaggccagggcagggatttggggcagacgtgggttgctgcctgccttacctgtgcataagaccaaccctgggcaggagttcctatttcttcccctgaaatccaggaatttgccaaacaggcagctctcacctggaaaaaaagtgactcaggcctccaagagagctgggatgaatcaggaaggcagggactgaatgtggggcccccacccaggggcctgggcctctcccagcaggaagaacatgagttggtccccagccctcactgggtaagagggcaatcctgccaaaatgcgcccctggccagccaatggggcacaataatcatcaccaccacactcactcccacattccagacctgtcggggcgccttcacgagtgctatcttgtcatgcataatctctgaaccccaagtcagggaggcccgggttccagctctgctgctcgtcctcggtgtgtgcccaggcaatcacgtaggcctagtttcctcctctggtaaagggggtggtggactcagtcggccccagccgctcctcctgacgtgggtgtggatgggaggcagtggctgcaggagacaggagcacctgggaacagcccggggttgcagccccagccctgccatttgccagctgtgtggcctgaccacttgctgctgtgcttcctcggcagtccctaagagtccatcctgctctgacaggagtgtgacctgagggaggtcctcagctgtgacctctgtctccctatacctcccactggcatggccagctgctgtccctagaactctgcctagaatgcacactaggcagctcaaaccctgcatgcccaatatgaaactctgatcatccccgaatgccacaaaagaacctccttcaccctgtatcccagtaaaaggcagctccatccttccagttgttcaggcccaaaatttggactcctctctttctctctaccccacagccaatccagcagcaaatactctggtgccaccttcaaagcagatccagaattccactgatgcttgcttcacctcttcctcactggtccaggtcctgtggtcctctgggccatcgaggaagcctcctctgggtcactctgtcccacgctttgccaccaccaccccccccccccccgccgcccaccatcagcattccctgctgcagccagagggatccttttaaacctcaagtcaggtctggtcccttggggcccaaactccacagaagcttcagagtaaaaggcaaagcctcgagggcagtgcaccgttctattcttgcaataaaaccaactcggttttgggaaaaaaactcaaaagaccttacaatggccgacagggccctgcatgctgtgtcctccattacctctcggttctcaggcccttctccctcctctccagccgaagcaccccttgctgtgttcagctcctctctcagggcccatgcatgtctttctcccaggcagccacacgctccctccctgacctccttcaagtcttggctgaacccaggctctcctcggcctccgcacttccattgcaacacccttccctggcagcagacctgatccacttgactctcctttgtttttccccaaacctcatatgaccttctaacatactctgtcatgcgtctatgtttgctgtttattgtctctctcctccctctagaatgttagcaccaggagggcagggctttttatctatcttgttctttaaaggatccttagcatctggcacacagtatgcgctcaatcaatacttacagtgtgactgagtgaataggcatcagtagactgtaatggaaaagagaactagtaatctgccatttcctaactgtgtgacataatctcttcatgcctcagttcgcttatttgtaaaattaagttaataatggtacttgactcatggggctggtgtgtggattaacatgtgctcaataaatattgactgtgaccatgatgctatctgcagagcatcactaggaggcaggtgtgtcgcggcccactgagcccctttccaggtcaggagatgtgcccggaaagcttctctcagctcacccggcaggcttttcttgcccagagcctagggagggcaccccatgctaaggagcaggaccccgcttcaaggaagtcggagccagccctgactcacatgctcggtcacccttggatgctgggagtgtggcatggaggaacccaggccagcagggaggcagtggccagagagcatggggcctcagatgggtagtgggtctctcgggggtcaggggacagtcatttatataatagatttctctcctagaagctgagagtaggtggccttcccagcctgagcaaactctcccgtttcttctttgagcagcaagattagtgggcaaaccagctctgaccagagaaatcactaaatccactctttggctcaagggagcctcaaagcagccccataagagccaaggtcaggcccctcatcaaatccgtttaacacttagataaacagaggcccaaggggcaagagaatcttcccagggtcccactgccagagacaggtggagctgggaccggcagtcagggcttgagaccttaaaccccggccagtttccttccgcagagagctgccgtttgagcccaggcccctactccctttctcctcaactgaagattgcagctgcaatttgtttccaggtgttcaggccccagaagactcacgttttcacaccctgtcgcttgaggttttctccatccaagggggaaaggtataggatgtttgcatgagtccctcttgatggtctatgagtttctccaggccccattaattgacttatgatttatactctacctacttccaaagaggacatgaagtagcttaccatagaatacatgcatataatgctgctaacaaaaaatgataatacataaaaattcaagaggagaaagaaagactcaaatacgccaaacacaggggctaacacagatcgtgtgattaagggttaactttctatctgggctcctagcagctaaggtacaagttggtgcaaaagtaattgtggtttctgccattaaaaggccacactacttttgaaatcaacctaataaaaagggcatcttcgggaggcactgaaccatcttttcatcctcccccagcacctggcgtcaaggaaacccttgaagaatgcttgaggctgactgaaaacatgggtggcagcctaagttcatgacttgctttggccaagtgaccccacggggacccatatccttactctctgggtccctccccagaggtcagtcctggggcacgccctgggtgcctgtatggctctcttctccgcccacaggaagtgtgaccccggatcatgacgtcatggctgaccttggcatctgtcctgctgccttaatgaatcaggcctcgctaaggagaaagccccaagtggccaacaggaatgactcaaaatgacttaattgatttaattaactgaaaagagaggaaaagaaaccaaacccttctgagggcagtttgagtacctgcttgggcaatgagtgcaatggagatgcccccggcctggtggctcaggttcaggaaacacgtctcaccctggccccaccctagggtccatggtgccggggcaggccgggccctgatcctcactgtctcaggagaaccaggcagccagggatcacagcaaggccatccacagtggaggatcagccctggcttttgtgacttagctttcaagagccaggccctggcagacgtcaccctcagaagcttcctgcagggggtgggttgggtcaggcaacccaggaaggacgggtagacataaataggtaaggctgaggaggagaggctttcttacggtgaaggacagaggagagctctgtggagaggttgggctgagccctgcaggcccagagtccctgagaagctacaaggagcaagggcgggcaggggaggctagattagacattgccttctgaccctcttcagtgagaaaaccctgcttctgcaggggtaaagatctcagcctcactgagctgccctgccctgtggaacccctgatgtgctagggacagactatccctgaccactgacatctactgagcaagtacaagtgccagacatgcttggggcttcccagagtgtagcccattccatcttcatcattctgcagtaagtaatgccactggccccgttttgcaggtgaggaaactgagttcagagaggttcagagattggcccaaagacacacagctagtaaatagtggagccaaggttagggtccaagtgtgttcaactgcagcacgcaagttgctcttagcccctccttgggcccccccccgccccaccatgggtgactgagacacaactcctgaccatggggctctcccggtctgattgccgtgttctgtcctacagaaacttggtccagctgggaagctttgttgctgctcttaggaagctcccggaaaagtgtctaatggcagggcaacagtggtggcgggggttgtgggttccctttcatctgggagctgtagccagcaggggctggaggaaggatgctccttaggaggcatcactgagaagtggactaaagagataacaccagcagaatccacctgtatcttctctaaggctgaggcctcctctccatgtgggcctctcccagcaaggggggcagacaggcactccccaccttcagggagccaggctgcctggcaggcggagcacttcagcctggagccaggagatctgaagggagggagatgcggtgctgagaggagatcagcccagaaaccccctgagtgtctttcatgtctgtgcaatgggtccatctgcagccagggccagggcccagcagaggccagaactgcgactgtctgaatcaaagccagtccacggccagggtcagaggtcagtcaaagatcagggtcatgcattagtcagaggccagcttgaggtctcagctataggtcaagggtaatggggctgggatcaacttttaagcagtgggctgcagaaggaagaggctgggaggtcccttgaacaaggtctggatcaagagactacagtgagtcaccagggtgacccctggggtcctgttggctgtggtcacctgctagggagcgaatgcaagccggggctgcggatgctccaggggtaggcaggggcctgcctacagactccgcgcccctcattcctcctggctgaggtcattccattggcccagccaccccagcctgggaggggaggcagaggttctgaagtggttcccccagagtacctgtgagtcatgatccctaggactgcagctactgggcctggcagatcggggtaccccaggacgctgctcccagccccagagcctcatgtgtcagcaaacgagagtcagttaaaggctaaatcctactgagactaagctatgtgccagacacagttctaaagctttatatacatagtttcttttaatccagtgatgtgttattactcagtttatagatgaggaaactgaggcacagaatggttaaatacatgactctggcacttaaatccatgcatggctttaaatgaggcagccaacctcactctgaaccacaatatgatttcagaacaggatgagactaaccctcccccaaccccaccaactcaagcaagctgtggcattgctaaagggctgtgggcatggggactgcagactccacatccctaccatgctacttcctcatagaagaagcttaaagccagagtccaaatctctagggatgaaattccaggcagcagcaagttgaatctttggagcagggtggactcctggcagtatcagccaggagtctccatttttcttgatccatgaaatgccgccatccccatttgtttcttttctattggacatggggccttccagcaggcagcgtaccttgggagggactcccagtgcgatgtgctggcctcccagtgcaatgtgctggcctcccaggaaagtgagctaagaaacattgcactttggtggagttgtgagatgctttggtaactgcgcttctatttgatgtaatggggttaatgaaactgggttaaaatacaggattctcaggatatgggttcccaaaggcaggaaaagggatcagtaaagacagttaaaggacacaggaccccaggggcatcgcatttgatcagcagtttactcattccaggcacttccacaggtaccttcaccagagtctcacagggaggaggtgctaaaactgagattatcaacctttttcacagatgagaaaactgaggccctcgtggggtaagtgtcgaagacgctttggaggctcctctgcagatgttccaccttgccccctcctctgttgctgggaactccaattttgcctgaaactcaccatccccagttcgtgagaaggacgcccccactcagctccagggtctctctattggctgaggccagtggcttgccaccttcccaaacccaatccacctttgatagaaaacattttgagccatcccctttactatcctgaaatgaaatccatagataatataatttcaaagggaagcatcaacacaatgcctttaacataaaggagaaatataagaagagtaatttctaatgagctaaacatgttttggtgtgcagacgatcaaacgggaccacagcacaggctgcactgtgccggtggcaatgcagacctcctggggcgctgcagccactcacaccccatggagcagcactgccaacactttgggaccttcagaagtggcaggaggctctcagtcaagttccaaagaaaaccatggagtattttctcccactgtacctggtaaacattgggcaaggatgcttctataaaatagagttaagggcctacgcctggatcataaaaaacaggtttctcaccttcatgaatgactgacatgacattaaaggtcacagaagggacaaattattctatgcaatgcaggacattcaaactttccctgcaccctccccaaacccctccaaatgccatcactccaacagtcacaacacgcccgcagctttcttctgtgagccagtgctgtaagctgatgacacagtcatctatctccttgcctgagtatggccaacaggacataggggggtggaggaaagttttctcatcatgattgaggggagagagaattacccccacttgtttaccagatgtcattttatcactgaccaccctgagggagacatggccaactgctgtgttagacagaggaaggatggaaagctcccaggcccctgggagttgaggggactgtcagcctgcagatccatctgccccggaaccaccctgagtatggactctgctatgtgaggcaataatcccatcttgcttaagctattctgagctgggccttcagttgcttgttcccatggatgttcagatacaagaagtggcttttcctgacttcacagccattctggaaatcagagctcaagtctcctggcctcagatgggttctctctccacctagtcctgagagatggaagcaaccaggcagggtcacttctcgggaagctttctggaaaggaggcctctgagccttctcaatgggtggagactctgaaggggcagacgtcctggggatgggaaggggactgtcccctccccagctccttccctgactcaagagacactaggattagcagccacattcctcactaatgtcatcttttatgctttcggtgctttacaggcgcctattagaagacaagcactccacccaaaggtgtctgcccagcagccagaactccctaagtgtgacacagaggcagcaccagcctcatctgcagtgagcatcaaaggcctccctggggaagccctcagcacagcccccaagggtgggaaggagtaggcggtatggaagtggtggagaggtggtcaaaccctctgagaagaccccacagtgatggaaacacagcaggacacaagctcctgcttgacttgcatccatctgccatggacctgcagatggaactgccatgcagcacctacagacctctgcgcagattctcagctttatccaggtccaagaggagccatccaaggtttgaagcacagggtgacacagccacttcaagtcctggtttccctgaaacccttgagcatctccacaggcctcccactgcagaaccatgctgtggcctcgagtttggtcctcagtgggagccagcatctgcacagctgccttcatggacagggataatgtccctggtccaagtcttctggcccttgggtgtcaggcgaggaagcaggacacactctagccccgagttacttctcgatacctcacttgtaacccatcattcccatgctcaagaagccaccatggctccctactgcccaagaggtcaattcgaagtccaccatctgcacccaaatggcctctcaaccttttcccttttgttcacaaacaccaaccccgaggtcccagcaagctaacctcacagcgccctcgactttcccacctccacaccactgcctacactgcttccccagcctggaatggctacaccccacaggcactcacatcatctacaaatcccacccatctcttaacaactggccctcctctcacaaacgtcctaatgattttccagctcctgccgcccttgacaactcctcagtcctcaaaacagtggagatattcagctatctaccatcagtctcagtaattaccttgaacagtctctttcatcctgtattgcttttcacattttcagcatttgtgttcttgcccaccccccactccattgtaaactcttggaggatgcagacctgtcttactcacacattcccagcacccagcatgctattggcacccacctgctaggagctcagcgaacgttctgtggttttgaattgcttttgctccaaggagtgactcagtgatgaaattgcctatacagagataactgggtggggggaggttgagggaagggtccctccctcgaattattatcatcaccaatgagtatttgttgcatgactttgcaaaagtaattagggaggagattgttcttctagtctgtgatgatggagtgaactccgcaagcaagagatgcaaatggaacaagacagaaggaacaagacatgggatggagaatgggtagggacagaagcagagatttggagagggagcaagacagtgacagggacagacagaaacagggccagggatggaggaggagaggtacatgtggaaacaggcagggacccagagagacgagcatcaaagagggcagagagggagagaggaagaccaacaaaagctgagagaggcagagggcagcaggggagtgggcccctccctccccagctgcttcccagccaggctgggccctgcatcctcagagccactcctgaaactcccacatgttgggacacgaagtccaggaggaaggcagccaaactggaaagcagccgaggagcagctgccaggcagccatgcacccaggaagatggcagtgatgaggagacgttgtcctgtcccgtggccccaccatcatacccccccaacacacacacacctgcacacacacacacatacacacacactgacctagccaaggtacactcctgcactggctggctgagcttggctggatgaggagtactttttcaaggcttgactcaggtgcctgctggtgacagggaaagggagtggcccagctgagaccatggaagctgcaggggtgggggggtcagaaacgaaaggaaagctgggattaaagtttcagtaacctgcctcgaaagtgcccaggtgttgtgtgggccaggattcctgggtgctgagtaaggcagccatccccgtgtggatgaggagaggagaggtgctggccactggttggtgtgaggtgggcagggggatggagagtcttgccggggactgtggcctcctcatcacctcttcccaccacgcaacaccttcctcacagtccaggcacccattgattgagggctcagacccccgctactaagaatggagtgaggtggtaggttgagactcagggaagcctgggcctggggaggtctaggaacgattcctgtgtgtgtggtgtggtaagagggataaaggatgccgagaaagaagggacgaagaaaggcaggggctgaagggctttaagaagacttagcctgccaaacttcgctattcattcgtgcacttaagcaacatttattgacacaggagaaaaggggggtccaatcagaaaccagcgtgaatagacaaaccccaaacctgatcacagactgaaccctaaacctggcctcagactgaactttaaccctggccacagactcactgctaaacctgtcctcaaactcacccctaatccctagtactccagctacactgagcctagtcttggctactggccacctcaaaactatatgtctctatctgaaaaggtacagggaaagaccatataaatgtttcttgagatccctgtcatcgctaccaccaacacacagcacatggcagaagggcctgacggatgacatttggctgcacattggaaggggttacaaatgccatgaaaagcccttgtttttctctagcatagccctaatgcccttcacagttgaattgcttctcctccacaccattccctctccctgcctgccagacaaatttgcccactgttccctgactccggactcctgaccctctcagagcccaatttcagagccccttgaacctaatcttaccagccaaatacaatctttatctcctccctctagccaatcccagctagaaggctgtctccctcctctgaactactgcctcaatgtaagttaataatccatttggccaagaatggccttctattgtcttcttaaagtgttattttcatttgcagaatgactgcatgttagacatacattcaaattatcgccccaagtaggtagtaatttttccattgttacaatcaatgctgtgatgaacattcttacaatatatctttatgtccttgtatactttaaaacatttcttcaaccagaggaatgttctaaacataattttaaaagtctaaaagtcaaaaaaaattatgatgaaaattaacagtatcctggcccactccccctgcttccctgaggctcttgcaatttctttagcagtttttctagtatttaactgtatatatctaaataatttgtttatattctgctttcttgattaatcaaatttacatcatttactgacttactactatggaagatgaaaaagggagcactcttacattgctacacacaaacatttcccctctccctggtcttctaatagatctgaattacaacatttccaaatctgagtcaggtagtatactatgattgcatttgctttcctgtacaatgtttagttcctcctggagtcaataacggccttgattttatttgcctagcttgctcaatacttatagttaattctctccaggctttctgacagaaccataaaacctctctaaataaggtcaatatcttccattttttcttagatttccttaacatagctgctgctcccatctgttctggctgtctcacatgccaaagcaccgtttttctagtacttctttcactaacatcttagggattcattttgcttttatcttgtgttggcatcttatttcctggctcccctgtcaatattttcttagtttattcttttattttgttggaacacaacctccagtagtttctttggaaaaaatgagagatacaagttttgaaaatttagatgtctgaaaatgcttttattctactctcaatattgattgaaggtttggctgggtataaaattctatatttattctttaaagagccttctcactaaaatatagccagaccctagaaaaattgccttaaatacaatttctatttttgtaatcatactcacaaaacataaggaaaatgaaaataacaaacttaggaaactattctttcatcattgagatctataatttaggtcaagtattcccagcattggctttacactagaatcagctgtggaacttacttaaaaaaaaaaagaaaactgatactccaaaatctgatttaatttgtctgcaatagggatgggtatagtttgttggtttttaaggtttttcgtttgcttgtttgtttgtttgtttttagtgagagacttctcccagtcagatgtagaatactgaattttttatgtgtgttttaaaatatacataacctaaaatttatcatattagccattccagtttggtggcattaagcacatttgcattgttgggcaaccatccccaccatccaattccagaagcttttcatcttccaaaatggaaactttgtactaattaaacactgactgtctattcctcccttcccctagcccctggccactaccatcttactttctgtctctataaatttgacttgtctaggtacttcatataagtgcaatcatatagtatttgtcctttttcgactggcttatttcacttagcataatgtcttcgaggttaatccctatgatagcatgtgtcagaatttccttcctttttaaggcagaataatattttattgtatgtgtattccacatttagtttatccataaagctactgatagacacttcagttgcttccacctattggctattgtgaataatgatactataaacatgggtgtacaaataccggtttcagtttctgctttctttcttctgagtacatactcagaagtggagttgttagagtacatacaaatcctatgtgtaatttttttttgaggaaccacagtactgttttccatagcaactgcactgttttacattctcaccaatgtaaaataaacactcccacagtgttccaatttctccataccctcatcaatatctgttattctttgttttgtttgttgggttttgttttgtttagggatttttagataatagccattgtaatgggtatgcagtggtatcttattgtggtcttaatttgcatttccctaaagattagtaatattgaacatttttcatgtgtttattggccatttgtatatttttttgagaaatgcctattaaagtctttgcctgtttttaaatcagtttttgtttttgttggttgttaagttgtaagaattctttttatattctatatattaattccttattagatatatgctttgcaaatattttctcccattccatgagttgccttttcactctgttgataatgccctttcgtacataaaagtttttaattttggtggagtccagcttatctatttttcattttgttgtctatgcttttggtgtcatatgcaaacaagcactgccaagttgaaagtcatgtagcttttatactgtttttttttttttctaagagttctatagttctcactataatgtttaggtctgtaacctattttgaattaattggtatatacagtgtaagataggaatccatcttcatttatttttgtgtaaagatatccagttttcccagcatcatttgttgaaaacactgtcctttcccccattgaatagagttggctctttgttgaaaagcatttgactatgtatccaagggtttttttttctgggctctctgttctattttgttggtatatatgtctgtctttatgccaataccacactgtttttattactgaagctttgtgagaagttttgaaatcagtaagtgtgagaccttcaacttgttctttttcaaaattgttttggctactcaggatcccttgggattccatataaattttagaatagatatttctatttctgcaaaaaatgttattagaattttgagaagagttgcatcaaatctgtagattgctttcactagtattgatatcttaacaatattaaatcttccaatccaggcatagacttaaaaataactcacaataaaagactgtagataaagcaaagagctagtgttctttaatttgtctttgaatttaccttgtctgccaagtcattcagctgaaaacttcaaaacatctttattagtagcttcatatgttaatcgatgaggatcataattacttttctttctatgatttatcaataaagaattcctcagaatgaatagcttctagttgggattatgcggcagaattagctaagagattttattttgtcttgtattactgcaaaatcctatttaccctatccttagtacatactgaatcgtaatttctagggatttaaaaataaaacaaaatctacctctaggttaaaaaaaaatctaagagcaaacaaaaacaatcagaaaaaaaaaaaaccccgaaaaaataaaaggaaactagaagaggcaaaacataaataaatatgaaagaaatagtgaccctgagggaaaacgccaatgttagcatgtggtagaaaaatgaagaaatcaaccacaaaactcaatttgagaaaaataagcacagggaaaacagaaagcacaaggtttaaagatgtcaataatcactacagtcaaatcactactgttaaatgatggatatgatcagagtcaactttttaaaaatttatctatgtggtgttgtaaaatgacacacataatgcatgaagacagagaaagattgaaagttaaaggataaaaaaagatgttgtaagtaaatacttacaaataaaaatagctagggagctacatcaataaaagataaaataaacgttgagatgaaaagcattattaaggataaaaagagtcacaacttaatgagaaaaagtttaatgtactggcaagataaaataattacaaacttgttggcacctattagaataaatgatagacccagggaggaatggaaaaatccgctataagagtcagcaatttcaacacaactcactcaattacttatggctgaaagggaataaaaatcaataaagatgtataggatttgaaagatacactgaagaagcttgatttaatggctatttctagatctcagcattcctcaatcagaaaatacatatactccttaagcacacatgagtgatttacaaaaactgacaacataccagaacatgaagtaagccttaacgcaattcaaagaactgctatcatttcaaactacaatctctaattacagtgcagttgaattagaactcaataacaaaaatataattattgtagacacacatttctaaataatggttcaaaaaaagaaaccataatagaaacttaaaaatgatcagagcagtagagctcagcttctagccaacatggagtaacgatgacaagatttaccctttcaccttacacaatcagaaaaccagacaaatatacaaagcattggatagcaagcagcacagaacttgaccaactgagagaagaaaagccaaatgtgcctattattttaccagcttactggctcctggtcagaaggtatgtgagacagaagacaaaggagagacatcatcaagtaagaaaaaaaaaatctgtcaacctagattttttacccagataagtattgttttcaaaatttaaataaaataaaatttttagacaaaattcgagaggattcattgtcagcagacctgcctataagtaaagttaaagtggccgggcacaatggctcacgcctgtaatcccaacactttgtgaggccagggcaggaagattgcttaagcccaggagtttcagactagcatgagcaacacagtgagactccatctgtacaaaaaaattaaaaatttagctgggcatagtggcacgcacttgtagtctcagctccttgggagactgaggtgggaggattgcttgaaccaaggaattcaagtttacagtgagccatgattggactactgcactccagtctggctgaaagagtgagacacggtcaaaaaaaaaaaaaaaaaaaggaaagaaaagaaaaagaaaagaggccaggtgcggtggctcacacctgtaatcccagcactttgggaggctgaggcaggtggatcacgaggtcaggagatcgagaccatcctggctaacacggtgaaaccccctctctactaaaaatacaattagctctgggtgtggtggctggcacctgtaatcccatctacaccggaggctgaggcaggagaactgcgtgaacccgggaggcagagcttgcagtgagctgagattgcaccactgcactgcaggctgggcgacagagctagactccatctcaaaaaaaaaaaaaaaaaaaaaaaaaaaaaaaaaaaaaggaaaagaaaagaaaagttaaaggaatgtcatgggcagaaaaaaaataataccagattgaaaaatggatccacaaaaagaataaagagcactacaaaggataaaaatcacattttaatctcttgagaagatagcatactgtttaacataaaaataataacaatgtgttttgcagtttacccatatgtgaaggaaatgtataaaaatagcacaaaggatgaaggaaacggaaatatactattttaaggtttgtataactatatgtgatgtgacagtttaaattacactatgataagttaaagatgtttatagtaaaccacagacaataattaaaacataaaacaaagtcatagagctaataagccaatagtggaggtaaaatggaattttaaaaaattattcaaaagaatgaaggaaagggaaaaggggggacaaagagtagattaaataaaaagacaacaaatagcaagatggtaggtttaagttgaaaaatattggaatttttattaaatataagtggcttaagcacagaaattaaaaggcagagacttttattagatttttttaagcaagaccaattatatattctctagaagatactcacttttaatataaaaacacaggttaaaagtaaaacaatgaaaaagatatgtcatgcaaatactattcataaaacagctggagaggctattttaatatatagtagacccaatattatcagtgataaagacagaataaaggggtaaattcatcaagaggacatcacaatcctaaatgcatatgcaactattagaagagattcaaaatatatgaagtaaaaacatacaatagaacaaagaaatagatacatttatgattacaattggagatttcaacattcctcttccagtaattgatagaacaggtagacagaaaattaataacaatatagaagactgggctaggtgcggtggctcatgtgtttaatctcagcactttgggaggccaaggcaggaggatcacttgagtccacaaatttgagaccagcttgggcaacatagcaagaccccatttctacaaaaaatttaaaaattagccgggcatggtggtgtgcacctttaatcccaactacttgagaggctgaggtgggaggatggcttgagcccaggagaacaagctgcagtgagctatgatcacactactgtacactagcctgagtgacagagcaagaccctctctcttaaaaaaaaaaaaaaaaaaagaatacagaagacttgaacaacactatcaaccaacttgacttaattgacatctacagattacaccatccaactatagcaaaagacacattcttttcaagtgtttatggaacattgaccaaaacagattatattccgtgtcataaaacgaatctgcctaaatttaagagtattgaaatcatgcaaaatttccttacacaacagaattaaactagacataaataacacaaagatttctgggaaatctgcaaatatttggaaactaaacaacacatttctaaataacccagccttccatacttcaaagaattcacaattgaagtaaaaccatattttgaattgaatgaaagtgaaagcacaatcaaccaaagtgggtggattacagataaagcagtgctctgacggaaatttgtagcatgaagtgcttatatattaggaggaaaagattataaattaatagtttaaacgtccacctaagaaactaaaaaaaaatttcaagttaaaccctaaataagaaaacaaaaggaaataataaagagtataaattaatttttaaaagggaacagaaaaaacaatagatatcacgaaacaaataactagttcttcaaaatacatgaagtaggaattgacaccacgaccatggtctctaaacctaccaaagattccctgggattatgtcctcaagacaaaataaatagataaacaaaataaaaaataaacctaacaaagactacaaaaaaatctcaaaccaatgtcgttattcattatattaaacctaaaaaaaatcctttatttagtcacttgaatccagcaatgcatctctaaaaagggtaatacagcaaaaccaaatggggttcatcccagaaatgtaaggttggtgtttacaaatggttccccaaaagacatttgtagcttaatccctgtaaatttacattaacttatttggtaaaagggtctttgcagatgagattacattcaagactttgagatgaggggattattctggattatctgggcaggccctaaatgccatcacaactctccttataacacagagggagattacacacccagcagaggaggaggcaatgtggccacaaaggcagagtgtggcatgatatggccacaagtcaaggaatgccaacagccctcttcagacaacagacctcacgatctgccagggtaggggcggggcaggcactcagtggcacagatttggagaagggtctcagagagttaattccctttttttttaactgcctcttaaacagctttcagagaagtctttctatgttagcaactgtgaaagaaaaataaatctcaggacctcaaaatcactaagccaaagggaaaagtcaagctgggaactgtgtcaggcaaacctgcctcctatttattcctaaataagatagctacaaagattttttttttaagttacatacctcccttacaatttgccaactaggaaaatcctgtgggccccaagatgtaaatggatagcttatcttcacaggtgcaggacaaaggacagaacactaagtcatccctctgctcgcctgagacaaatgcatatctgattgcttcctctaatgtaaaaatgcagattctctgaactagacataagtgttcctctacccagcccccgccccacatgtaaattgtgtattcagtgaaagactgattagactcaaaagaatgcaactgtttgtctcttacctatccacacctcttaaaaatttcttcctctttacccattattccctctttgccctttaaatattaaagctttcaaaatcatctttggagaaggcatagacctgcttgccaggcatgtgtccttaaccttggcaaaataaactttctaaattgattgaggcctatctcagatactttttagttcacacaacacacattccttccatcacctccttccagaggtttcaattcccaggtcttttgaaggtcttgtgatacaatccaggtgagttcccagggttgtaagatttgtcaagtaaattaccactcttctattggctttccagctaacagaaatgggttgctccccacgctgtggattcaggccttttaaaacaatccctttactgtagctttagaaagattttggaaaagagcaaaattaaatacatgtgttcgatttgccgttctccgctaaggcttccatttttcaacttccgaagctgtgttgacaactttattccattgtcgtctccttgttattttacacttctcttttaactttagtcagtcgagtgggattttaggagagggcagagagaaatccacatattcaatctatcatgtttaactctccaattatctgcgtaggctacattccttcccagaaatggaactgctggtgtcagagggcttgcacaattttaagactcttgatagagatggtcaaatagtcctctaggaagtttgtactaatttatacttgaatcagtaagttatgaaagtgcagatttctctatatcccaataagcattgtgcaataatattcctgttaagctttgcaaatctgctaaggagaaaaaatatatctcattttgcatttatttttactactgaatatcaatgtatttatttgttagctgttagttttgtgagttgcctactcatgtaattttccagttcttacaattaagctatacatttcttagtgatttttaagagcactttgtatagagaagattgactcctatatttttattgcaaaaaaattccactttgatacttttttcttttacttttttcatcataatattttccacagtatgaatttatgctttttatgtagtcaaacttatcagcatcttactttactgctttgttctagtgtcaagagtagaaaggattcctatttgaaatgtattttttgtaaaaaataaggaagagaatccaaccatatttttgctttaaaagaatccaactatgcatgtgccatttaccagacagcccactctttccctacttcaatgaaatcttatctttaccttatactaaacccttataaacacttgtctttgtttggactttctatttaattccacttttacatttgtgtgttctgatgttggtgccatactctttttatttttatagttttaaaattctgtatatcttattatctggaagggtaagtatcttttcattactttgcttttccataattttgttgactcttcttttatattgaatctttacataaacagaatgtttctggcaggttgaaaaaatcattcagaatttgtggaaattatgtacaaccaacagattaatttgaagataacttatctatttatgatatagttttctcacatagaaattaaattaaatgttatatctctaattattgctattgggttgaattgcataaaactgcttatatttgaccttttgacctacaaaaactaaaattttatgttttaacataatagtactcaagaaattgtttcttagaattgtattttcattctttcaatggaactcagatgtagagaattgaattaatcataaccattggtttatgactcattctcattggtccacatgtgacctgcttttatgcattcatttatttagttaagtaggccatgtggtagcttgtcttcaagtcaggtgccatcaattcttccctttcttgtatcacatgtttttcatcctttgagaggtagagtctattcctcctcttgccttgatttctgagactaggtcataagaagacttgcagcttctacctgggcctctcagtgcagtcactcttggagtcctgagccaccatgtaagaggtccaactaccctgaggccgccgtgttgtgaggaagcctaagctagccccatggagagaaagggagcaacacctgaccaatcccaagctgtttcagccccagctgttggactcatccaaactgagaccccagctatgtggaacaagataagcctctctgtgccctatctcaactccagagaatcataaggtataataacaaaggttattttaagtcatttggcttgggatggcttgttatacagcaataagtaattgaaatggatagttttagttagttagttagctttaatgattacataagcatctatgaaaccatcacccaaaacagaggcttgggccttgacaataacctacatctaaatatatgatctccctccatcccatttccctgcctgtcccaactcaaatgaatcatcatccatcatccctgtattcatcacttaaatattttctttttgtatagtttttctgcatctatatattcattaaaatatacattttttattttaacttcataaaagtggtatcatgctgaatcttttgggacttacatttttcacttaatattatattactatgattcatccatattgttgtatatcattttagttcatttgttttgactactatgtaatattttatcatatgaatttataacaatttattcatccactcttccactgatgggcatttaaattgccagatttttgatatttggaacactgctatgaacattcttatgcctgtttcctctgttgtacgtgtgcaagtttctcttgagtatatgtgtaggattagctcaaaaggtaggataaactttaggaggtagtaccaaactgttctccacattagttgtatctatttaaatccccaccagcaagattatgagaaagaggtcctttggttgcatatcctcttcaacttttggtgttgtcagattttctcatttttgccaactggatgtatattaaaaaacatcccattgtggtcttaatttgcattttctgatcactaatgatgctgagcatctcttcatctatttatggatgatatgtttcctcttatgtgaaatgtctgttcacagtttcaggaaattttctattgggttgtatgtgcttttcttattaatctataggagttctttatatattcttaatgcaaatccattatctgtagctactgcaaataccttctctcagtttctactttgtatactttctttttatttatttattttaatttttattttaggttcagggatacatgtacaggtctgttacgtaggtaaacttgtgtcactgagatttgttgtacagattatttcatcacccaggcgctaggtttagtacccagtagttatttttttctgatcctctccctcatcccacactccacccttcgctatgcctcagtgtctgttgttcccctcattgtgttcatgaattctcatcatttagtttgttcttataagtaagaatatgtggtatttggttttctgctcctgcattagtctgctaaggataatggcctccagttccacctatgttcccacaaaagacatgatctaattttttttttttttttttttttttgagatggtgtctcgctctttcacccaggccggactgcagtggcgctatcttggcttactgcaagctccgcctcccgggttcacgtcattctcctgcctcagcctcccgagtagctgggactgaaggtgcccaccaccacacctggctaattttttgtatttttagtagagatggggtttcaccgtgttagccaagatggtctcaatctcctgacctcgtgatccacctgcctcggcctcccaaagtgctgggattacaggtgtgagccaccgcgcccagccatgatctaattcttttttatggctgcatagtattccatagtgtatatgtaccacattttctcaatctgtcactgatgagaatttaggttgatttcatgtatttgctattgtgaatagtgctgcaatgaacattcatgtacatgtgtccttatggcagaataatttatattcctgtgggtctatacccagtaatgggattgctgggttgaatggtagttctgtttctagctctttgaggaatcaccacactgctttctacatggttgaactaatttacactcccacccacagtatacaagcattcccttttctctgcaactttgccagcatctgttatttctggacttctgttttttttttttatacttcaagttctagggtacatgtgcacaacgtgcaggtttgttacataggcatacatgtgccatgttggtgtgctgcacccattaactcgtcatttacattaggtatatctcctaatgctatcccttctcccctccccccaccccccaacaggccccggtgtgtgatattccccttcctgtgtccaagtgttctcattgttcaattcccacctattagtgagaacatgcggtgtttggttttttgtccttgcgatagtttgctgagaatgatggtttccagcttcatctatgtccctacaaggacatgaactcatcattttttatggctgcctagtattccatggtgtatatgtgccacattttcttaatccagtctatcattgatggagatttgggttggttcttaataatagccattctgacttgtgtgagatggtatcttattgtggttttgatttgcatttctctaatgattagtgatgttgagctttttttcacatacctgttggccacatgtatgtcttttgaaaagtgtctgttcacgtcctttgctcactttttaatggagtttttccagttttgcttgtaaatttgtttaatttccatatagatgctggaaattagacttttgtcaaatgtatagtttgcaaatattttctcccatcctgtaggttgcctgtttactctgttgatagtttcctttgctgtgcagaagctgtttagtttaattaaatcccatctgtcaatttttgctcttgttgtgattgcttttggagtcttcatcatgaaatcttcaccagatcctatgtccagaatggcgtttccaaggttgtttaccagagtttttatagttttgggttttacatttaagtctttaatccatcttgagtttatttttatatgtggtgtaagaaaggggtacagtttaaatcttctgcatatagctagccagttatcacagcaccatttatcgaatagagaatcctttccacatcgcttgtttttgtcacgtttgtcaaagatcagatggttgtaggtgtgctgccttatttctgggctctctattcttttccattggtttatgtgtcttgttttgtaccagtaccatgctattttggttacttttggcctgtagtatagtttgaagtcgggtaatgtgagcctccagcttcgtttgttttgcttaggattgccttggctattcaagttcttttttggttccatatgaattttaaaacagttttttctagttctgtgaagaatgtcattggtagtttgataggaataccattgaatctgtaaactgcttcctatccatgagcatggaatgtttttccatttgtttgtgtcatgtatgatttctttgagcagtgttttgtaattctcactgtagagatttttcacctcctggttagcttattcccaggtatttcattctttttgtgataattgtgaatgagattgtattcctgatttggctctcggttggctgttgttggtgtatgggaatgctaatgatttttgtacattgattttttatcctgaagctttgctgaagttgtgtatcagctgaaggagattttcagccaagactaaggcttttctaggtaaagaatcatgttgtctgcaaacacagatagtttcacttcctctattcccatttggatgtgctttatttctttatcttgcctgactgctctagccaggacttccaatacaatgttgaataggagtggtgagagggggcatgttgtcttgtgccagttttcaaggggaaccctcccagcttttgcccattcagtatgatgttggttgtggttttgtcatagatggttctgattattttgaggtatgtttcttctatacctagcttattgagagtttttaatatgaaaggattttgaattttattgaaagccttttctgcatccattgagataattgtgtggtttttgtctttacttctgtttatgtgattaatcacatttattgatttgcatatgttgaaccaaccttgcgtcctgggaatgaaggcacttgatcatggtggattagctttctgacatgctgcttgattcagtttgcaagtattttcttcaggatttcagcatcaagaggccaatgttcatcaagaatattggcctgaagtttttgttgttgttgttgttgtgtctctgccacgttttggtgtcaggacaatgctgacctcatagaatgagttggagtccctcctcctcaattttttggaatagattcagtaggaatgctaccagcttttctttgtacatctggtagaatttggctgtgaattcatctggtcctgggctttttttggttggtaggctatttattactgattcaaatttgaagcttgttattgtctgctcagggaatcaatttcttcctggttcagtcttgggagagtgtatgtatgtgtccaggtatttatccatctcttt

SEQ ID NO: 231 - DNA, 31737 bp, Homo sapiens
gatctgcctgcctcagcctcccaaagtgctgggattatggatgtgaaacactgtgccctgcctcaccttgaccttctgatccaacagagtctgggggagcagagccaggggcaggtgtgtcttcaggagtcgtggggccggtgtgtctttcagagtctccatccctgagcagtgggtcagggaaggtctggtgagctgaagccccagccctgtcttcctccactccccttgcacccaggacacactcacacacctgagggaatccctggggctttgaactcaaggaagggcacccgcatgaagatgggagctcggtgacacttctccaggtcaccaccctggtagatcatgtccagaatctggcttacccaggtagtgcctggagagggagggagatgggaggtgagcaggctgagggcacgacctcgctggccaaggtggggactgccacctgggagagggtgggtggccctcctcacttaccggacttggggtaggtgctgatgagcaggtcatcaggccgggcctggaagctctgcaggggccccagtgcctctgcaaagtacttgatgagcgggacccccttcacgtactccagtggcgggcgggaggtgtcctggatcagctccatgttcctgcgtcaggggccagagccaggcccgttcccttaccaccatcacaacagcaagaaagtggaattcttgctttcagggaagtcactgaggcctagggaggctgagtgacttgcccgcactcacaaagccactcagtggcggggctggggctgaaaaccaggtcgggctctaatgcggtggttccccagcctggcctcacctttcattcacctgcggagctgttcaaaatcccagggcctgggccatggtgcagaccagtgaaagcaccctcgtcgggcaaggcccagatgtcagggtgtgtgaaggtctccaggagagtccagctgcactgaggaagctctaggaccttcctgtgctgtctccctgccagccagcgccctttgtctcaccacttcctgctgggacccccagcctccacccagtggagatgctcccctccttgagcccctcagcccctcacatgtggaaaccgcccaggccagccaggcctgtgatccacttgcctggccacagtccatctgggctccaggacaaacacggcccattgaggaactgagctgctactaggggccagagctgctgtgggaatgaacaaaactctgatgactcagcaaaagcacaggcctaggcagggtggctcccacctataatcccagaccctagggaggctgaggccaggagttggagaccaacctggtgcagcattgcaagaccccatctctaaaaatctttaaaaaaattcttaaacattaaccaggcaggatgatgagggcctgtagtcctagctactccagaggctgaggcaagagaatcacttgagcccaggaattcaaggctgcagtggccaggatcccacagcactccagcctgggtgacagcaagacctggcctccccggggaaaaaaacaaacaaacaagggaagggagggggattcacgcaggccagggttgtctgaaatgggatatccatggggaaagggcagggatgccagaggcctcagcttctggaatgttagagccacaagctgagcagggtgagggcgccctgggccgttccactgtgtcactcacctgagctcttgggaacctggcctcgtgccctcctcgcccgcagtggctgattgtgggtgttgtgtggggaatgcagggttgttctctgagctgagggtttcctaggtccactgtgggagggatctggagccggggctggacttagatttgcttccggaaggaaggggtggggttgggggtgggggagcttctccattaccctccttagtgtgccagctggagacaagcttaaagtgatctccaaagccacgactgagtttgctgtgtagaaaacagaagaatgaaaggggaaaggcccaatggtgggtttgtttttgtaggttttttttttctgttttttttttttttttttttttttttccgagctgtcactgggctcctgacctgcccctgaactccaccctgccaggcagccaacagacaagctctctctaattgacccaggcaagagaggggagggattggaggagaaagctgggataggcaggccctggaaaggtcacctacctgctggctccaggccagtcttgaaggtgccaggggttctggcccagtgcagcccacaggcccccagcagcccatgcactccaggctctgaccacaaggccagtctagagggatgtgtgtgggcagagtgaaggggcaggggtggagcagagcatggatgcatagaacaagaaagaacaaggacactgcagtcccattgccctgggagtcagccccagcttcatggctcctggggacctcagagaacattgatagaagatcctagaagaaccacaacccgtggcaggtggttttatttccctgggtttgaaggaggctccacagacaagagaccagaggaggccgaggtttggaagccacagggccccgtggaaggggggcatccccccatcctcctcgttctttatcctcactttaaagtccaaggtcaagctgtgcacgagacaggtaaacaaccatctgagtaaaggtgaatctcccaagacttccaagaaatgcgtgagttcagaggcaagcggacaggtgggagtgtgggggaagctgaggcatgggaattccaggcagaggagaggcttctcatatgctagggccatggacccctcctccctcctctgtgcccatgaggaatccccgtgactggcaggtcctcaggctactagctccacccctgccctcagcaaccctcaggaggttcccttgactaagactttgtattgcactctagtaacaacctgtcggacccacacggggtgacacagaaaagaggcgagaatgtgagattaatagagtggtagcaagtgaatacaaaatcccaggcagcagtttcacatgaggagaagaaggaaacttgaaatagctgcatgcgctaagggccaataagtccctgaaaaataggatgaggaccaagctggctacgaccaaccagacacaacatggcgctgtatttgatgtaggtttcacctaggatctcattgtatgatcagtaacatatgaaaccgtacacccaccagtgccaagacggctccaggaacacctgtatttgggtgtaaattgtggcaccacggtcttgagaaatctttaccttttcctggactcttcatgaatatacccctctttagttgaagaagcccataaaggtcagccccacaccttgtagggcatgagacactctcttgaggacccccacgttcctcttcttcagtgagtccctttactctgcaggaaatctgcctacattcatgacttttgcacttgtccttaaattgtttctggctaaggtgccaagagcctggagaaggcctggcacggtggctcactcctgtaatcccagcactttgggaggccgaggcaggcagaccacctgaagtcgggagtttgagaccagcctgaccaacatggagaaaccttgtctctactaaaaatagaaaattagtcaagcctggtggcacacgcctgtaatcccagctacttgggaggctgaggcaggagaatcgcttgaacccgggaggcggaggttgcggtgagccaagatcacgccattgcactccagcctgggcaacaagagtgaaactcggtctcaaaaaaacaaaacaaaacaaaaaaaagcgtggaaacgggctgaggtcgatgtcccaccggtctttgatgacctcccctaggccaccagtatctggaggggattagggacactgagctccagcagggctatccagtgtgcctgcagaaacaaggttggtcacaggcagcccaggacagggagtggggtagggaggctggggccaaagcccactcacgtcttctaattccgagtcttccactatttcccccgtgctcatccatcacagccagatcaggtcacccaaagcagtgacgcctcacagctaccaaggcatggggccagagagagagacagagtcaggcatcacaagccccctccaggctcagccctgaataccaagatcaggacacggctgccccggcctggattgcacaactgggcaccctcttcccaaagctggaccaggctggggccgggggactgcactcagctagggcattggccctctaggggcagaagctgccctggttcttccggaaggaactcctctcacaggcagatcacgtgggctcttagccaacagccagggttggggcaacacaagggccccgcttcatcctgtcccaggcagcaggcaggtaagagacaaggagggagaggcagctggcagcaacccctctatgcagcaggcactgttccgggcattacacagctccatcccgtgaggcagaggtgactgttatttgcatcttacagatgaggaaatggaggtgggggtttaaaatccttgcccctgggactaagctggtgcaggtcctgggagcatcagcagtgattgattgagtcacagcctcaccactgcagccagacctgaacttcctcacagctcagcaacacccagcaggtcactgaatgtccccagggcaagtcctctactcactcactattagcgggtgctcagtagaaggcacccgttttccattattttattaactatttcttggctatcgtctctgtgcaggactttgttctacagcagtgacaagagctgccctcgggcaatgtagtgcaaaggttggggtgggagagactaacgagagtcataaagcacctagccggtgagatagtaagtattcaggtaaagaagcagacggggaagtacacaagaggtgcaattttattttatatttttagagacagtttcttgctcttttgcccaggctatagtgcagtggagcgatcagagctcactgcagcctccaactcctgggaccaagcgatcctcccacctcagcctccccccgtagctgggactacaggcatatgccaccatgcccggcttctcagagctgcaattttaaatcgggagatagagaagacctccctgtggaggtggcaggttatcaagataggtgtagagaagaaccttccagtcaaagggaaaaggcaggtcctgctgtgctcaggaatggccagaaatactatcatccccatcttagagacggggacagggccgcaaaagtgtcagggcgtttcctggctcctcaacaaacagctggatccgaagtggtctgggggatgagccgccctgcctggggcggacctcccctggagctcaagggctcgcagggcgcacaggcctcttgggccccgggtccggctcaggctcgggcttggtgccagcaaagggacctgcgcggtgccctggggccggggaggcccgaaggccatcgcccgtgcggcgcggcgcatagaggtcccggcggaggtcggggtgcagcgggagtaggaggcgcgcctatggagggggttccaggcccactccaacagcggcaggatacggaggagttagggcggctccaggcaggggggcggaccccaagcccttgcccgcctgccgccgcctggtctccttccttacccgaagggttgccacggcgggcgggaagccgtgcacgacgagcactttctccctggggaggagaacgggggtgtccctgtgagccctgccgcgcccaaccgcgggtcccctccaattccacccgagagcggggtcctcactgccggcttcagcctagccccaggccctgcccctaaatgaagtcacgccccctgcacctgcccacctcaggccgcgcctccagcccaggtacccacctgtcccccctcttctctctcctgcgctccatccgaccccagcatgcccaccaagacccctacgctggcccgcatcctggatcatcacctccgccccagccagctcctccccggagttccaccgccaagattcccagggcactgtctccccgtcatgctcctcctctgtgacagtcccgtccccaccctggactccccacccatgtcacaggcatgcccttccctctcatcaggcttgtgcccagcggggtccgcctcctccaggaagccttcctcctggcacagagacccttccggtctcaccaggagtgcaatggcccgatttggctcactgcaacctctgccgctgccccctgccccatctttcaagcaattctcccgcctcagccttttgagtagctgtaattacaggcacgtgccaccatgcccgactaatttttgtatttctattacagacggggtttcaccatgttggtcaggctggtctcgaactcctgacctcaagtgatccaaccgctttggcctcccaatgtgttgggtttacaggcttgagccaccgcgccaggcctgggccctgccttttgtgtggcccccattgtgctgctggacctgacaagcagggctgacagtgaaccccatataaacgtggccctgatgacgggggttcaggccgtagagcaggtagatgctgaagaagcgccccggcctagccgcgactcccgtggaactctttgaattttaggaaattctccttaaacacacttctggttcagcaccgacatcaagaagagagcctctccaccacctgcaaactcactttgtccctccctggttcttcccgctgggcgcccactatgctgcggtctcgcccatctgtagctgagcccagcagcccctgtaggacacctggccgaacgggtcacagtcctgctgggctcactcgggagatggaggctcccaggggctcctccaacagccccagggctgctctctggtcactgcacctgcctgggctgccactctgcttctcatctgcacagcaggagaaaaactccacagagcgtgctgtgggcggggccggctgtgcagggagcaccgggtccttgccctgcccctgtcctccacactcccctacagggactgtgcccctggctgcatcctgcattttcctccttttgtccacaggtatgaggtagatgacattgatgaagaaggcaaagcgtgagtgtccaggccagggcagggcatggagcctgggggcagcctaccagctgggaaggagcatccccacccggccacaggttgacacaagcccctctaccaccaggagacacaccgtgagcttgcgccggatcatcccgctgacccggtggaaggccaaccccgagacagaccccgaggccttgttagtcaaggagaaaaccatgttctcaggatgctgtgaccttggtgacagcacggccaacacaggaagcctgggcaacacaggcagttgggcccgggtgaccactaccaccaatatgcagagactggtagtggccccgaacgtcgggctgcgctgttatttattggatacaaggctgaagggtcagggtaaagaatgtgagtcacctccaatgataggtaaggtcacgtgggtcacgtgtccactggacagggggcccttccctgcctggcagccgaggcagagagggagaggagacaaagagaaagacagcttatgccattatttctgcatatcagggactattagtattttcactaatttaccactgctatctagaaggcagagtcaggtgtacaggatgaaacatgaaggtggactaggagtgtgaccactgaagcacagcatcacagggagacgctggaccacgatccgcctggtaacgggcatcttcccagatgctggtgtcaccgctagaccaaggagccctctggtggccctgtccaggcataacagaaggctcgcactcctgtcttccggtcacacctcactatgtcccttcagctcctatctgtgtatggcctggtttttcctaggctatgattattgagcgagggttattataatattggaagaaaaagtaattgctacaaactaatgattaatgatattcatatataatcatatctaagatctatatctggtataactattcttgttttatattttattatactggaacagatcgtgtcctctgtctcttgcctcggtgcctgggtggcttgccgcccacaattctcctgactcagcctcttgagtagctgggattacaggcgtgcgccaccatgcctggctaattttttgtatttttagtagagactgggtttcaccattttggtctggctggtctcgaactcctgacctcaagtgatctgctcacctcggcctctcaaagtggtgagattacaggtgtgagccaccatgccaggccagttttatttttttaaatacagacagggtcttgctatgttgcccaagctggtctcgaactcctaacctcaagggatcctctcgcctcaccctcccaaagtgttaggattacaggcatgagccaccacacccgacgtacttcattatttcttatgtgaacttggctacaataaccccccactctggtttcctctgctgcaattacctaaccgtgaagtgcaagatcctcagctccgggtgttcaacagtctccaggatccaaactcattccaagttgctcaacaaatactctgtgaacaccaaactgcctgtggtttctcccctctgggcataccgtggtgctttacacattgtcaactctactcagctcttctgcccctggaatgacctgtcccccagtatgtgcctaactccagatctttttttttattttttattttttattttgagacagggtctcgctgtgttacccaggctggagtgcagtggtacaatcatagcttactgcagtcttgacctcctgggctcaggagatcctcccacctcagcctcctgagtagctgggactacaggtgtgagccaccatgaccagctcatttttgtatttgtggagatgaggtttcatcgtcatattgcccaggctggtctcaaattcctgagctcaagcaatctacccaccttggcctcccaaagtgctagcattacaggcatgagccactggtgcctggccccagcaagacttccttgatccccactcccacacctcctcgctgtgctgagtacccatgggctctgagagcatttctcatcgaactctagttaatgacttgtctatttatctatctatcccactagactctaagtccctttaggacagaatctctgttttatatggttttttgggtatcttccactaacacctaggacagcacctggaagacagtttcttttcttttctttttttttttctttttgtgacggagtctccctctgttgccaggctggagtgcagtggcacgatctcagctcactgcaacctccgcctcccgggttccagcaattgtcctgcctcagtctcctgagtagctgggattacaggcacccgccaccatgcctggctaatttttgtatttttagtagtgacggggtttcaccaagttggccaggatggtctcaatctcttgacctagtgatccgcctgccaaagtgctgggattacaggtgtgagttgtcgtgcccggccgacaatttcttatcacaagaaatcttcccaaaaaatctccaaatgggctgggctttagactgctggtataccctctttcttttcctgagggtagatgagactcactcattgtaaccactgttttttaaaacagtatgcaaatattcctgcggttttgttcatttacaaatccctgcctgaagcttctttctttcccaattctacttcctgctctttttttttttttttgaaccagggcctcactctgtcactcaggctggtgtgcagcggtgcaatcacagcttattgcagccttgacctcccaggcttgcaatcctcccatctcagcttcctgagcagctgggacaacagacgcttgccactatgcccagctaatttattttatttttgtagagatggggtctcactgtgttgcgcaggctggtctgaaactgctgagctctaccgatcctcttgcctcagcctcccaaaatgctgggattacaagtgtgagccggctacttcccgctcttttttttttttttttttttttttgagacagagtctcgctctgtcgcccaggctggagtgcagtggcgtgatatcggcttagtgcaacctccgccttccgggttcaagtgattctcctgcctcagcctcccaagtagctggaactacaggctcgtaccaccatgccctgctaatttttttatttttagtggagacagggtttcaccatgttagccaggatggtctcgatctcccgaccttgtgatccacccgcctccacctcccaaagtgttgggattacaggcgtgagccaccgtgcccggcctaaattttgcactggactggactatatatatttgtgccgagcaaacagtaaaaccgctgatttgttttgaaccttggagtaacccttggaaaccttctccttcactatcaatacctttgtgatgttaaagttcttttcaccaggactccgcagaatgctcacctgaaaacattggctctgaatgtgggaatgattccattaagccactcacagtctaccatccttattttgcaaatagaatcccaaatttacaaaataaattgtccctttggctgcaaaatttacaaaataaattctgatcattaataagagttaatataataaagtcagaaatcattgagaacatggactaaaattcagagatattatttcatttctttttttctttttgagatggagtcttgctctgttgcccaggctggagtgcagtggtgagatcttggctcactgcaacctgtcttcagattcaagtgattctcctgcctcagcctactgagtagctgggattacagacatacaccaccgtgcccagctaatttttgtatttttagtagagacagggtttcaccatattggccaggctggtttcaaactcctgacatcaagtgatctgcctgcctcagcctcccaggtgttgggattagaggcgtgagccaccgtgcccggcccagagaaagtatttctttccaattcatgagaagtatagacactcttaaagcctctcctcatacatctatcaaaataactttaagatttctctgtcaaaatattggacccttctgccaaccaaactggagctctaatttaggaatagtttaataaaaatgtacttaatgttgaggtgggagaataactggagcacaggagtttgaggccagcctgtgctacatagtgagactctgtctctatcaaaaaatttaaaaataattagctgggtgtggtggcacatgcctgtagtctcagctactcagaaggatgaggtgggaggatcgcttgagctcaggaggtccaggctgcagtgagccatgaccatgccactgcattccagcctgggtgacagaatgagaccctgtctcaaaaaaaattttattaaaaaatatatatatacatatatatatatagacacacacacacacacaaagaatcctgatatgattatacaaatgtatcaaatcatcacatgtattctgaaaatacatacatatatgtgtcaattaaaacattttaaatctttataaatatgtacacagaaagtatatatttttgtggatctatgtacatatatatacatatacacatatatacacaaaaagttactgattgtatatgtatatatattgtattgtatattgtgtgtgtgtgtgtgtgtatatacacacacaaaaagatactgataacattttcaaacgcctgtcttaccatataggtgttccagaatttctgtttcaggtccaaaaatatgtcatcctttccctggagaatgctcatacctatttgcaaaaacaccaaaagaattttaaaagattcagtagagtactgtataacagttcatgtttaagtttaccattccaaaatgcaaagtaaccatcactatcatccatcaatatgaccctctgatcctacagtgaaaagagaacatagacaggtgccgtggctcaagcctgtaatcccagcactttgggaggccgaggcaggcagattgcttgagtccaggagttaagagaccagcctgggcaacagggcaaaacctcatctctataaaaaatacaaaaattagccaggtgtggtggtgtgtctgtagtcatagttactcaggaggctgaggtgggaggattgcttgagcctgggaggtggaggctacagtgagctgtgatcatgccactgcactccagtctggacaacatagcaagaccctgtctcaaaaaaaaaaaaaaaaaaaagaacatagtctccactctaaaactagaaaattttaaaggaatgataaatatgatgtgagaatagcagaatataaaagttatagcagaacaattattttttcaaaaactataacaattcacaaaaacaatccagttacaatagtgggtctattggttacttttctctaccttccaaacattttgtgaaaagttgaacatttggacattttgaaattttaatttctatcttttaaaaaaagctagtgggctgggcacggtggctcatgcctgtaatcccagcactttgggaagttgaggcgagcggatcacctgaggtcaggagttcgagaccagcctgaccaacacggagaaaccccgtctctactaaaaatacaaaattagctgggtgtggtggcgcatgcctgtaatcccagcttctcgagaagctgaggcagaaggatcacttgaacccagaaagtggaggttgcagtgagctgagatcgggccaatgcacattccagccaggatgataaagcgagactctgtctcccaaaaaaaaaaagaaaagaaaaagagaacaatttcactaatttcactagttgtttcctcatttgtaacatgagagtaataagaacaatctcaggtgcgagggctcacgtctgtgatcccagcactttgggaggccatgatgggcagattacttgagttcaggagttcgagacgaccctggcaaacatggtgaaactttgtctccattaaaaatgcaaaaattagccgggcatggtggtgtgcatctgtaatgccagctacttggtaggctgaggcaggaggatcgcttgaacctgaagatggaggtttcaatgagctgagatcaggccactgcacactccaggctgggcaataaaacaagactctgtctcaaaaaaaaaaaaaaaaaaaaaaaaaagaagaagaagaagaagaagaaaagaaaaagagaacaatctcactagttttttgaggattaaatagcattctggtcccctaccccttcaccgctgtacaagacttctttaacagttgctaggaagctgtttgcaaatctagtctgcaaatcacacgccgggaccaggcacagaccttctgataaaacaggaggccctagctccccggctgtctgttctcctgacccactgaccccgtcaggcttaagacccatagagattttctccccagttacccaccccatccccttcaaggctatagaaattgcaatgatgatagaggccacagggaccctcctgtgagcagatggaggatctccaaagattacaagaatttaaccaacttgagtgatcagcctgttttacagcctcctgacctcaacctgttcttccccagccctgggtggaatgaggtcaccctgtttgtttaaatcagctcctaaatgaccccaggttacttacagatgaacccaagttaactctcctcattaccatgctaaagtcttcaccccgggagaagctatagcttcatgactataacctatgcaacctatgcgctagcatcatgactcactgggacccctactctacatgcaatcatgcaccctctcctttctccatcaccccataaaaccctcctgtctctttctctgggggacacactacttgggagaatatgcccagtgtcttcctttcttgtgccaagtaaaactcccattgatcaaaacccgcctcttggtggagtcatttgtgactcgttaagggaatgaaccccggtatttttcaggtaacatttccattgttcttattgtacgcagtagagaaggtttccacagtcaagcccctgtcccccacaccccaggcccgggtcggattttctaaggagagggttccctgaaccctcacaggtatatagtcctctatggcaaggatccaaggtcccttgatgttttccgtgagaccccaggggaaaatcttgttaccaaagcaggactaggcccctgggcatgaatttgctgaagatccaggcccaacctcagattccacctgctctgccccccagggtcacgggtccccttgcattttgttcctgtgttggccccggggccccaggcgtggattttctgaacagcaggtcggttccttccctgtcccacgattggttcacggtcattgcagctgctatggccttgaactgggatctcctttattttcccgtgggcctttttcagggggcaaagacctccgcagccctgcctacctccagccttggcctacacccaaccccagagtctgagccccgaccctagtcctctaaattcctgacctgctgtacctctggctccccaatttctcggctccccagccagtgcctcctgcaacttctcgcaatcaaacaccccagcctccagcctttgccctggcccttcaggcctctgaagcagctccggtctcagagccccggctcctgcccgggtccccaggctcctgcagcgccctccctccagccgcttgatccccaagtccctgcctccagtcccccaatactggtcccaccccccaggttccccccccggcccctcaccggcgtagaaggccgagaccgcgatgggcgcaccgaccacctggtcgcacagcaacttggccagcatggcgcgcggcgctcggcccgggagcgcgcgctccagcaggcccagccacacgtagttgaagttggcgtggaaggtcaccaccaacgtggccacgcgccgcgtctggcgccagtcggcctagcggccctgcagccgttgctgcagcacgtccccggcggagacgagcgagctacggcacgctcgtagagcgtagagctacgttgctcgagcaacgtagagcagcacgttggtgggccacgggtggcgccgggccgtgcgcgacaacgccggccaccagcccgccatgtccgcgctgtgggcgcccgcgatcaggagcccgcgtggtcggaggcttcctgcaccgcctccgggcctcgccagcctccagcagctactgcgctgcagcagccggcacctgcacctgcctcctccaggagctcctgagcggttgggcgccccgcgcacacccagctcgtgccgtccaatccggaggccacgggccgtcgtgggggctgaacgtttgaaaggtgcccggcccacccccatgcatgggtccgttgacacaaaatacccagaataggcaaagccacagaggcagaaggcatggggttatttatttatttatttattttatttttattaattaattagatatttttgagacggagtctcgctctgtcgcccaggctggagtgcagtggggcgatctgggctcactgcaacctccgcctcccgggttcaagcgattctcctgcctcagcctcccgagcagctgggactacacgcgtgcgccatcacgcccgactaatttttgtatttttagtggagacggggtttcaatatgttggccaggctggtctcgagtgatctgcccgccgcggcctcccatatggggttattttttggagtgatgaaaacattttgaaattagataggtgtgatggttccatgactttgtgaatatattaaaaaccattgaattgtacacttgaaaaaaggaggtgcatttggccgggtgcggtggcacatgcctgtaatcccagcactttgagagaattagacaggaggatcctttgagggcaggagttccagattagcctggacaaaataggaagaccccatctctacgaaaaaaaaaagaaaaagaaaaagaaaaaagtattgtaattactcagacttggtggtgcgcactgatagtctcagctactgctacttgggagtctgaggtgggaggatctcttgagcccaggaattcaaggttgcagtgagccacgatagggccactgcactccagcctgcaaaaaaaaaaaaaaaaaaaaaaaaaaaaagaaagaaagaaagaaaaagagagagaaaataaaatggtaagttttatggtatgtgaatttatcttaaaaaatgaagggacggccgggcacggtggctcactcctgtaataccagcactttgggaggccaaggcgggcggatcacgaggtcaggagatccagaccatcctggctaacacggtgaaatcccgtctctactaaaaatacaaaaaattagctgggcgtggtggtgggcacctgtagtcccagctactcgggaggctgaggcaggagaatggcctgaacccaggaggtggagcttgaagtgagccaagatcgccccactgcactccaccctggctgacagaggaagactctttctcaaaaaaagaaaagaaaagaaaagaaatgctaagcaaagtgttctggtgtgttttgcctgttttggtagtggaagggaagaaaatctgtctttttctttcttctccccctttaaactatttaagaagggaactgggcacggtggctcatgcctgtaatcccaacactttgggaggtcaaggtgggaggatcacttaggtccaggaattcaagaccagcctgggccacatagtaagacctcatctctacaaaaaaataaaacattagggctgggtgccgtggcttacacctgtaatcccagcactgtggcaggctgagggagctggatcaccttaggtcaggagtttaagacgagtctggccagcatggcaaaaccctgtctctactaaatatacaaaaattagctgggcatggtggtgcgcacctgtaatcccagctactcaggaggctgaggcaggagaattgcttgaaccgggtaggtagaggttgcagtgagccaaaatggtgccactgcactccagcttgggggacagagcgagactctgtctcaaaataaataaataaacattatttaaaaaaaaaagatcccctgggcatacaataagtaataccatactacttaggcaaataaagcccaattctatcatttgggaatcttaagatcagttctaccactttgtggatcttcagactcaatctctattttagagatattaacattgattgatcctactatgtgccaggcactgtctttcacaacttcacatatatgatctcatttaatcctcatttaattttggcagagaaaagttgagctccttacccaggatcgtataactaggaaataaagaccaaagcacatgcctcactcttcttgttattagaaaagatttccttctgtaaacctcaggactttacaagcgaaatattggattactgtaatatggttcatcagcccaatttatttatttttattatactttaagttctagggtacatgtgcacaatgtgcaggtttgttacatatgtatacatgtgccacgttggtgtgctgcacccatgaactcgtcatttacattaggtatatctcctaatgctatctctcccggcttcccccaccccatgacaagccccagggtgtgatgttccccaccctgtgtccaagtgttctcattgttcaattcccacctatgagtgagaacatgcggtgtttgattttctgtcctggcgatagtttgctcagaatgatggtttccagcttcatccatgttcctacaaaggacatgaactcatccatttttatggctgcatagtattccatggtgtataattgccacgttttcttaatccagtctatcattgatggacatttgggttggttccaagtctttgctattgtgaatagtgccgcaataaacatatgtgtacatgtgtctttatagcggcatgatttataatcctttgggtatatacccagcaataggatggctgggtcaaatggtatttctagttctagatccttgaggagtcgccacactgtcttccacaatggttgaactagtttacagtcccaccaacagtgtaaaagtgttcctatttctccacatcctctccagcacctgttgtttcctgactttttaatgatcgccattctaactggcatgaaatgatatctcattgtggttttgatttgcatttctctgatggccagtgatgatgagcattttttcatgtgtctgttggctgcataaatgtcttcttttgagaagtgtctgttcatatccttcgcccactttttgatggggttgtttgatttttttcttgtaaatttgtttaagttctttgtagattctggatattagccctttgtcagatgggtagattataaaagttttctcccattctgtacgttgcctgttcactctgatggtagtttcttttgctatgcagctctttagtttaattagatcccatttgtcagttttggcttctgttgccattgcttttggtgttttagacatgaagtccttgcccatgcctatgtcctgaatggtattgcctaggttttcttctagggtttttatggttttaggtctaacatttaagtctttaatccatcttgaattaatttttgtataagatgtaaggaagggatccagtttcagctttctacatatggctagccagttttcccagcaccatttattaaatagggaatcctttccccatttcttgtttttgtcaggtttgtcaaagatcagatagttgtagatgtgtggtattatttctgagggctctgttctgttccattggtctatatgtctgttttggtaccagtaccatgctgttttggttactgtagccttgtagtatagtttgaagtcaggtagcatgatgcctccagctttgttctttgggcttaggattgtcttggcaatgtgggctcttttttggttccatatgaacattaaagtagtcttttgcaactctcatcagcccagtttaatattacctatttattataatgtaatgctgctcgcacaactgagaaaacactgttgctttaccccctctggctctgtagcagccacgcacaaatcatagaactataaacatatgctaattacacaacctatgtaggcaatcaatattaagaaaaatttttactgcccaatatttctgtggttgaaaatgtacagtctaattttgatccgcagtaacatctaggttaatgttgattcagaaggaaaacatttgttgttgccatgagaagaggcattgaaacgctgaatcaccaccacaaatgttaccactattaatataaggagatacataggaagatcgaattagaccatctcggacaaccaggtttacaattccacctgcagatacatgcaagaagtattgtcacaatacttatgtcacattattccattgaggtcatcaccaactaagcttatcattaatgtgtggtcaatttggtcaatgtcaccagcgtagcatactaacaaaaacaagggttgcaaactcaaatgcctataaggcagaacgtaagacggtaggaagcaaagtctatagggagctatataatagaggctgcagattcatggcagattctaaagcacagcagtccccaacatttttggcgccagggaccggctttgtggaagacaatttttccacaggcggcaagggatggggcgcaggatggtaatggtcttgggatgaaactgttccaccacaaatcatcaggaattagattctcataaggaatatgcaacctggatccctcgtgtgtgcaactcacaacagggttcatgctcctgtaagaatctaatgatgctgctgatctgacaggaggcagagctcaggcagcaatgcaagcaatggggagcggccagaaatacagacgaagcttcaattgttacccaccattcacctcctgttctgtggcccagttcctaacaggccacagaccagtacatgtccatggcccaggggtcagggacccctgctgtggcacattgcttaatagaggactgtagcagccatgtgccctgacttttccttttttttttttttttttgagatgccagaaacctagaatttttttttttttttttttttttaagacaaggtctggctctgttgcccaggttggagtgtagaagggcgatctcagctcactgtgacctcaacctcccaggctcaagcaatcctctcacttcagcctcccacgttgctgggattacaggcacactccactacacccagctaatttttttgtattatttgtagacatggggtttcgccacattgcccaggctagtctggaattcctgagctcaagctgtctgcccatctcagcctcccaaagtgctgggattgcaggagtgcaccaccacacctggcctgaaacccagattttatttatttatttattcattttttgagatggagtcttgctctattgcctaagcttgagtgcagtggcgtgatcttggctcactgcaacctccacctccctggttcaagtgattctcctgcctcagcttcctgagtagctgggattacaggcacatgccaccatgcctggctgatttttgtatttttagtagagacagagtttcatcatgttggccaggctggtctcgaactcctgacctcaggtgatccacccaccttaacctcccaaagtgctgggattacaggcatgcaacaccacacccagcctgaaacccagatttttaatatgaaatcgaagtcttcaaaccttgtaggtgtcataaaaagcacgctgaggaccactagtttgcaactgccaatctaaagtatcatagacattatatcactttaaccatgaaaaaaaaagtatgtgaggcagaaaatggaagcaaccatgcccaatttattgttgaatactttttacgtatactaagagcttcctttgcactagcatctgaaactatattcagaatgacattggttttcataaaagtattgatcctcacaactctttatagtcttgcacctagcacagcggagtgaaacactttaaatggcacttgttccttgagtatatatggaaaaaagtgaagtattgataagtgttcagctaatatgagcagcatctcaggagtctccaattcttgaattaccagggagtatttttaccattttcccccagtgaaaggcctattttgagagacttaccctccaaaatgaatgcattaagtcatattacttttttttttttctttttgagacagggccttgctctgttgcccaggctggagtgcagtggcatgatagttacaggaaaggggtcccaatccagaccccaagagagggttcttggatcttgcacaagaaagaattcagggtgatcccgcaatgtgaattgaaagcaagtttattaagaaagtaaaggaggaggggcacggtggctcacgcctgtaatcccagcactttgggaggccgagacaggtggatcatgaggtcaggagatcaagaccatcctggttaacacggtgaaaccctgtctctactaaaaatacaaaaaaattagccaagtgtggtggtgggcgcctgtagtcccagctactctggaggctgaggcaggagaatggcgtgaacccgggaggcgaagcttgcagtaagccgagatcatgccagtgcactccagcctgggtgacagcgggagactccatctcaaaaaaaaaaaaaaaaaaaaagaaaaagaaagtaaaggaataaaagaatggctactccatagacagagcagccatgagggctgctggttgcccatttttatggttatttcttgatgatatgctaaacaaggggtggatttttcatgcctcctctttttagaccatataggataacttcttgatgttgccatggcatttgtaaactgtcatggtgctggtaggagtgtagcagggaggatgatgggaggtcactcttgtcactattttggttttggtgggttttggccagctccttcactgcaacctgttttatcagcaaggtctttatgactggtattttgtgctgaccttctatgtcatcctgtgacttagaatgccttaaccattagggaatgcagcccagtagtttcagcctcatttttcccagctcctatttaagatggagttgctctggttcacatgcctctgacatgatcactgctcactgcagcctccacctcctgggttcaagagatactcctgcctcaccctcccaaggtgctgggactacaggtgtgtgccaccacgctcagctaatttttgtattttttgtagagacggggtttttccatgttgcccaggctggtctcaaactcctgggctcaagcaatccttctgtctcagcctccccaagtactgggattacaggcatgtcccaccatgcccagactaatatttacttttaatcagactaagatagggttactacttgagttgctatggctccagctgaaagcctgtgcagtcatatcatgggtaaacatttgctttatgctaaaaatatggtggacctggcattacagctattacaaatctcctaaggtgtctcaggtagtgtattagttacttttcatactgctatgaagaaatactcgagactgggtaatttataaaggaaaagaggtttaatgtactcacagttccacaaggctggggaggcctcagaatcatggtggaaggcaaagaaggagcaaaggtacgtcttacatggctgcaggaaagagagcacgtgcagggaaactgccctttataaaaccatcagatttagtgagatgtattcactatcacaagaacagtatgggaaaaacctgcccccatgatttgattacctcctaccaggtccctcccacgacacatggggattatgggaactacaattcaagatgaaatttgggtggggacgcagccaaaccatatcgggtagcaacaacctagggtcagttttgcaggtggtaaagccatttaccaagatagttgtaggtaaagaagggcagatttattagagaaattatgaaaatatgttgcagtgggcagctcagcagagaaggggctacctgcaaagaggcaggggctggaggaaagttttatagggtcctgctgaagggtgctacgtgtggaatgaggtcattgtgcccgcaggttgtttgtgattagctgtctctaacaattgttcatacagtaattgttcattattgttctcaacttggggctctccccaacctggggacccttccttattgttgcttacttatcaggactccacataagggtgtggaaacttcattcattcatatcttcaacacaaattgtaggtagcctgttttttaaaaaatttattcaacaaatatttagtccaagccactgttacttattaccctctctacttctgtatggacttttaactatctctgacactattcactattcttccacattctctattatttatacctatggtaaaatttgccagtttgaccatgcaactaatactcacagggaatatatagagtctagaagaaaatatacaggtccttagaggctgctctgccaacaaaaccataatgcaggaacaaacatcacaactatgccaaataatcaatcctacaatgtccaaaattttactttaaaactggaatttccagacttcctttctgcattaaccagtttaactagatagtaatgaaatatccctctactttatgctgtgatagtttatttatttatttgagacagagtttcgctcttgttgcccaggctggagtgcaatggcgcgatctcagctcaccacaacctccgcctcccaggttcaagtgattctcctgcctcagcctcctgagtagctgggattacaggcatgtaccaccacgcccagctaagtttgtatttttagtagagacgggagtttctccatgttggtcaggctggtctagaacccctgaacacaggtgatacccctgcctcagcctccaaatgtgctgggattacaggcatgagccaccgtgcctggccagaaaattttaaacacacaaactctcaggtggcctaattccctctcaccaaaccagtcaaaatacagacaaaagagaataactatattagttattgtacaaacaaaaaagactgataaattgtgaatgatgcatgatttttaattacaagtaaactgggcaaatgcttctgcattgtttaaagctaaaaggtgatcagtggaaactttcctctgttagtactctaatactttttatatttatcggctcactacaacctgtgcctaccaggttcaagcgattctcctgtctcagccacctgagtagccgagaccacaggcatgcactaccatgcccggctaattttgtatttttaatagagacagggtttcaccgtgttggccatgctggtcttgaactcctgacctcaaccgatccacctgccttggcctcccaaagttttgggattacaagcgtgagctaccgcgcccagccttattataattattatttaaatatcttttgctctctccttcaagagagacctcatctcattcagtggcatccatttatttattcatcttctgcctcctgggctcgagagatcctcctgcatgagtctcccaagtagctgggactacaggctcacaccaccatgcttggctaatttttgtaggttttggagagacaggctcttgccatgttgcctaggctggtctcaaactcctgggctcagatgatccacctgccttcgcctctcaaagcactgggattatagacatgagccaccacgcccagccccaagtacttttacacaaaatgcaaacactattcttctatcataaaagtgataccacagcttctgtgaagttttgccaggtagtactcataattaccttgggtaaactttttgatgttaaactgtatcttcttattatgagtttttccattgtattaacaacttttacaacaacgcaaataacaagttatttaacaaaccatttagaaatttctgtactatggtcctgataatgtaaaatatattaatgcctattacattcagataaattatacacttggaaactacatacttatgacttacagaaacttacataaacaaattatacaaattatatgctcaatttttaggtatatagtcttaaattaagcttaaatatacattctcaagataaattaacagttcagggcttcataacttgaaatctgtggaagatgacattggagacaacagaactctggtggaattcttaggtgggatttgctgaaactttttttttttttttgagacggagtctcgctctgttgcccaggctggagtgcagtggcgcaatctcagctcactgcaagctccgcctcccgggttcacgccattcttctgcctcagcctcctgagtagctgggactacaggtgcccaccaccacgcctggctaattttttgtatttttagtagagatggggttttaccatgttagccaggatggtctcgatctcctgaccttgtgatccgcccaccttagcctcccaaagtgaaacttttctttaaaatagagatgggatcttgctgtattgcccaggctcatctcaaactccttgccttaagtggtcctcccacctcagcctcccaaagtgctgggattacaagcgtgaaccattacatccaagtgaaacttcttgagatagttacataatttttaaatctgctggtgtagaatttaataaagtgtagaactgaataaatattaaatattagatcaaatttctcatgtttaccttaaagtataaagatttatcttaaagcactgattttcacaaaataacatcagtgtgaaattggaaaagaagccaaatattttatttcatgtatctgggaaatgaggggctttagtcaactgaatctgcccaaaactaaaaagcattcattaaaaagtacttaactcagaaattataaaaatagaagacatcaataaaatacattctacacagaatacgccaatcatagactactcttttttgataataaaaaacgtacttactgagccagttgtggtggctcatgcctataatcccagcaccttggaaggccaatgagagtggatcagttgaggccaggagtttgagaccagcctggccaacatggcgaaacgccgtctctactaagaatacaaaaatgagccgggcatggtggcaatcacctgtaatcccaggtactttgaaggatgaggcaggataattgtttgaactcaggaggtggagattgcagtgagtcgaaatcatgccactgcactccatcctgggtgacagagtgagtctctgtctcaaaaaaaaaaaaaaaagaaaaaaaaagaaaaaaagtcagttgcagtggctcacgcctgtaatcccagcactttgggaggccgaggcaggcagattacaaggtcaggagatcaaggccatcctggccaacatggtgaaacctctctactaaaaatgcaaaaattaggctgggcgcggtggctcacatctgtaatcccagcactttgggaggcggaggtggtcaggagattgagaccatcctggctaacacagtgaaaccccgtctctactaaaaatacaaaaaattagctgggcgtggtggcaggcgcctgtagtcccagctacttgggaggctgaggcaggagaatggcatgaacccgggaggcagagcttgcagtgagccgagatcccaccactgcactccagcttaggcgacagagccagactgtgtctcaaaaacaggaaagaaaacaaaagaaaatttggactattgccaattacaaatatttttagagaagattcgaaacaataactgtggatgatggaaacaatagttatgataaaagtctgatgaaacttcccagttcacaaggaaatttaattacttatgtgcggcattttaagacagtaatcagaatcatgactgacagcatcatatcaggaccaccagacttttataaatttcatgtaatcttcagaaataattaataacttttttttttagatagattttacctctgtcacccaggcgggagtgcagtggcatgatctcgactcactgcaacctccgcctcctgggttcaagcaattctcctgtctcagcctcccaagtagctgagactacagacatgtgccactaggcatggctaatttttgtatttttagtggagacagggtttcaccctattagtcaggctggtctcgaactcctgacctcaggtgatccacctgcctttgtctcccaaagtgctgggattacaggcatgagtgatggtgcccagccattcatgacatgtttatacaaatataactttagcaaatatttagcataactatcaaaattacaaataataacatcttaaatttgtataaatgtgtgtaatttttggaacacgtatatcaacaacatacccataaatataactgagatgagatctaatgtcacctcacttgacagtgccctcccatgcagtatcaccacatttgacaatgcctgcccatttaatctaccaaataaatcgaatcacttaatacctctacaagatgagagatacattctttagactccccaagggacacagctgaaaaatcccaaagttaattttaggccaaaaagacttgatttaggattttgacactggaaaaacccatcaaagacgtcaagtttgaaaacacttgatcaaaacagaatcacaggtcactattaaaagagtattcatttaaccagagacttccaaagcaatacagaaacttacatggatataaaaaccttaacccttttaaagctcagttttgctaagtgatcaaaaggggtacttgaattgaattgacacaggaagagtgtgtacagggttatgagtgtaggcagatggttactttggtcatatctccatttgccacctgattacacatgagaatggcatctttactcaccagaaagcctgtattataggaggtgtaggaggcattcttggacttgagacaagaacattgttgtgtagaaatttcattgactgtgttaaaattattctccatgggctggagaacacataacatggcctttagaatgagatgggcattgattggatgcaaggtgtccacacttactagccgtgtgacattggacaaagtgcttcatcattctgagactcagtttttaaaggaaaaacaactaactaccttgcaagcttgctagcaggtttaagtgtaataatgtgtgggaatgactgcaccatgactaacacgtagtgacggcttaattaatgttaacccttatcattatcatgtaagaatgtgagttgcataagagaggaatcctgtcagttcgttctctgctgtgtccccaagaccatgaatcatggctggcacgtagtaggcttttaataatatttgttcaacaagtatttggcagtcttggagggcagaaaaggaggtggggaagatttttaaataacattttttaaaaagtcacattgtcctacaatatcgatttttcttgcatatttaggaaattgagggttttttcctaaaacatgcggacatatgggaaatatgatccaacatttgcactaatgtttcagacacagttagaggtttccaagagattttgtgctggggaggctgcttgctacaagctcccaaagctctgggaggacatagtattcattcctccctcagcagaagcggtgaggcaagaagctctggggagcacccagccttggacttttagcatagtgtgtcaggtcttcatagtttgggcccagggcacagagaagtcacagctctctggcatcctgtgacctttaccctctttgccaagggaaaatgtggcccaccaaagcaagaaacttgagggcatgggtcaccccagccctggcatctgcccagagcccgagaaggaaggaacaatgatcctccagctacctcacagggctggcacaggtgaccactgccctggcatcacccagctgtgtccggcagcctgaaccccatctgtggggatgcgaggaggaaaatacaaaagtccttaggtgagcactgagaaggcagatgcagcagaaaccaccaggccggaactacccagtcttggacctatggtggagacagagcatagctggcgatcatgtgtacttacactctaaggtcacctggttgcactatggcctcatctgtggctctgaaaatgaagatttggaaggagatcatcacagctaatgtttaagaagcccctcctgtgtgccaaatcattcacccgtcaccacaaccgaatgagctaaggattctcattatatatagtttatggagagggaagtgcagacataaagaggtgaattatcttacccagatcacacagctgataagtggtggaggcagaatagaatctaaacagtgtagaatctaaacagaatagaatctaaacatgcattgatttgacaagtgtttattgagcacctgccatgaacaaggccttgtgtgattaaatagggttataattagtaatataaaaatgagaaatcactaatgctttttagacttaacattttcttttttgtaggtttcaggcacagaactgtatatccaataatagtgaaatggatcccactaattatgacagaaatgatgatacatttaaatgacttggatgttttataggtatgatctcatgaaaccttgagagaaactgaatgacgaatgaaactattgttcctgtttcacacagaagaaaactgaggttaaaaggggtaaagtaattttgcatggcatgaagtagaaattcaaagtacaggaatttgaacttggttctgtccttttctgaagcccctatgctcttgaccactatagactcaaacatcaccttgtttttccactcattcaacaaactttttttcttaattgtctaataggttggcactcatcatgagcccctgttctcattctgcaaatggtgaagctctctattgtcctgaccccacagttcctgtcccatgaccagggccagctcaccaaggagctgcagcagcatgtaaagtcagtgacatgcccatgcgagtacctgaggaaggtgagtgagtgcagacaagatggggcctggtgcccttgagcagttcccgggtctcagctgccacacatctcatagcgggtgatgctgggggaagcttacgcagtcacagtactggcttcttcctctttttctttccatacaagtggcttagggatggggtaaagtagttgacttatttggatgaaaaccactatcttctgtcagaaactcaaaaggaatcattgctggcatggtaacctaaagaaaaacaaccagacaagtgcccaacgacacttaaaaagtttatttattatcttgccaagtttaggctgggcatggtgactcatgcctgtaatcccagcattttgggaggctgaggctggtggatcacctgaggccaggacttcaagaccagcctgaccaatatggcaaaacctcgtccctactaaaaatacaaaaattagccgggcatggtggtgtgagcctgtagtcccagctactcaggaggctgagacaggagaattgcttagattcaggaggtggaggttttagtgggccaagatcacgccattgcactccagactgtgcgacagagcgagactctgtcaaaaaaaaaaaaaaaaattatcctgcaaaatttgaaaaggaaattcaaatcaacagcttctaaactactttttaacatgactcataataagaaatacattctatagtacatatatatgttctataattttgaataaaagaattaaccacatcacatttattttacaacatgtaatacatattttttattctccttcatttgttttgaatgctctgtgcagtctacaaaaagtccaatagtaataattaaattagtcattaagttgaacattatcttgtcttttaaaataataatctcaaaaatgatcttttatttttgagatttatatagatacacacacacacacacagacacacacacagacacacacacacacacatatatatatatttttttttttttttttttgagacagagtttcactctgtcccccaggctggagtgcaatggcacaatcttggctcactgcaacctccgtctcccgggttcaagcaattcctctgcctcagcctctgagtagctgggactacaggtgtgcaccatcatgcccagctaatttttgtattcttagtagagatggggtttcaccatattggccaggctcgtgtcaactcctgacctcgtgatctgcccaccgtggcctcccaaagtgctgggactataggtgtgagccgctacaccccgtccaagataaaattattttaacaatatactatgaagagaaaaacactggctatgaaagaatatgcatagttttaccctgtttaaaaataaagattgaaagaatacatatgcaaataagtttacttttatttttggtaacactttactgcattgtctgaatattgacaatcagtatgcatcatgaagctacatggctaacattgtgtactca

SEQ ID NO: 232 - DNA, 1541 bp, Homo sapiens
gtgggctccgtgctctgcacccagctccttcccgggcgcgcacacgcgcttcctctcttgagctcccgggcgtccggaggcgaaggtcccggagcgttcacgagaatccgggtcccggcgagtccggggtccgctcctccagctgcgcccagggcgcacgagccggccagcctcggggagagggcgcgggggcgctgggggttcttacgggaagatgaggaagcccgacagcaagatcgtgctcctgggggacatgaacgtggggaagacgtcgctgctgcagcggtatatggagcggcgcttcccggacacggtcagcacggtgggcggcgccttctacctgaagcagtggcgctcctacaacatctccatctgggacaccgcagggcgggagcagttccacggcctgggctccatgtactgccggggggcggccgccatcatcctcacctatgatgtgaatcaccggcagagcctggtggagctggaggaccggttcctgggcctgacagacacagccagcaaagactgcctcttcgccatcgtggggaacaaagtggacctcactgaggagggggccttggcgggccaggagaaggaagagtgcagtcccaatatggacgctggggaccgtgtctccccaagggcacctaagcaggtgcagctggaggatgcggtggccctttataaaaagatcctcaagtacaagatgctggatgagcaggatgtgccggccgctgagcaaatgtgctttgagaccagcgccaagaccggctacaatgtggacctcctgtttgagaccctctttgacctggtggtgccaatgatcttacagcagagagctgagaggccgtcacacacagtggatatatccagtcataagccacccaagaggaccagatctgggtgttgtgcctgactttcgagggcctcctggactcagactgtgcatgttgggaaggggtctgaccaggcaagctgtgatctgaaaggagcaaggaacagcaaggaattattttccagaatgacacccgcagcagaatgttggagtggaaatgatggctggctatgaagaggaggtcaacgtgtgtggtctcctcagtctctgtcagaggggtggggaggtgggaaacaggaatcctctgcaaagcccaatctgcagagtcgagacccctggtgctctctgccccgctgcctggcactggtcctttgcagccagccaccaacggcccccttgcccttgcagaggcagaagcctgcgtctgcacctgcacctctgaccgtttcagcaccctgggttgttaccacgtcctacaactctgacatttcttgttctcaagcgtttctcttcactgtgagttgtctttggtcctcccacttggtacttgtatcttgatgctttataatcctgactctcgacgtgttcatttatacaaaatcaggaataactttgtttttatactgattgcagcaatgttggctacatgtattattaaagaggatttttggaccaaaaaaaaaaaaaaaaaaaaaaaaaaaaa

SEQ ID NO: 233 - DNA, 366 bp, Homo sapiens
tttttgtgtattctgtgcctactatgtgcaaggcacttatttattccatccattattttcaatatccacaaaaagcccccatttaagtagcacagcctgcattttacagatgaggaaactaaactgaagttcagtaaagtcaggaaacttcatccagaaccactcatttctagtaaacagatgagcagacctgaaaacccagaatgagtggcatcaaaacgcgcactggtttctctacacagccctgattcggtctccacacgtagaaaatgaggttagacaacaatctctagggtcttccgtggccttgagagttgataaatctcattctggacttcctagcttcagcaggcagcctgaacatgt

SEQ ID NO: 234 - DNA, 31737 bp, Homo sapiens
ggatcctggtgccaactatcaaatcgattgtgatgctgacatgaagccacaataataacatgggtgggtggttttcatgccaggctccacagagccttgggtgttccttgcagtctcctcacaggccattgcgagggagaagggaagcagacctctggggcctccacctctgcttcaactaaagtgctgcactgtatctcttacatctcaaacttctaagattttatttgaagatttccgttttcaaaatggtggcccaaacacatactgctgccttcccttcagcactaggttttcagacacaatagaaaaaatatgtaacaggccgggcgtggtggctcacgcctgtaatccaagcactttggggtggtcgagatgaggggatcatttgaggttaggagttggagaccagcctggctaacatggtgaaaccccatcactactgaaaatacagaagttagccagccatgttggcactcatctgtaatcccagctactggagaggctgagacaggagaatcgctgaacccaggagacagaggttgctgtgagccgagactgcaccactgtactccagcctgggcaacagagtgagtcaaaaaataataataataataataataaattttaaaaagtaacaatactcagaaaactagaagggagacttttagagaagggggttttcagaaactgaaaatccctaaaagaccaaaaggatcagaggaagaaaaaaaaatagtctaaggtgtgtgcaagagagtcctgctgcagaagggacaggtgccaccaaacatttgtcccacctggtggttggaatcgaggacctgggtggctgaggtacaagaggcagcgtgcttatttgggaagggaagaacagagtcaccctggtagactcattccccctggtgtcactgtgaatagagtggagcacagaagaagacagctgcatccacctctcctatcagcagtcagtgcaaattgaattagtctatgtcactgttaataaagaaacctggctgggcgcggtggctcacgcctgtaatcccagcactttgggaggctgaggcaggtggatcacctgagatcaggagttcaagaccagcctggccaacatggtgaaaccccatctctactaaaaatccaaaaaaattagctgagtgtggtgatgggcacctataatcccagctatttgggaggctgaggcaggagaatcccttgaatccgggaggcagagattgcagtgagccaagattgtgccactgtgctccagcctgggtgacaagagcaagtctctgtctcaaaagaaagaacgaaagacacctaagcaggatggccaaatatccaaataaatccaagtgcatgggggaatctcccaacaggacgcagggataaagaaatagaatggaagaacgaaaagtaagaaatatggacttcagacacagtaggttaaaaagccctcttttaagggttccagtaggaaaaaaattgagaagaaggagcagagctaacaaagaaattacagagaagaatttcctaaaactgtagtcctcaaattgaaagttccctggaggacaaagcaagatacatttttttttaaatgaaacaaatcaccccctatagattagagtaagctatcagaatatcaaggataaagaaaaactaaaatatttgagacagaaaaagcaggtcacccactatggcatgtaaatcagtctaacatcacacttcactagcagcacccagtggaagaagacagtggagtagtcactttctgaaatgctgaggaaaagtgaccttgttatagaattctctacctaatcaaattgtcattcaagtgtgaggggtaaaatttgatgtttttggacatacaagacctgagaaagtgtcccacccatcaattgtcctgaaagaattgctggacggtggagtccaggaagaagcaaagaaattagcaaaatttatagttggtcttaataactattgagtataaaacatatatgtgtgcgtgtgtgtgagtgtgacgatttggaaccccttgttttggcttaaataaaagcttaaaaaccaatggaaaaagggatgaggtcaaacttctgtctcatatcaccctctggattaattctgtatacacagggtgtttcttctcttaccctctggaggagccaagtgaatcaggggagtttcctttatggttcctgatgggcacagtctgtcttctctgccatctggatggcacaggagagatgaactctcagatagatgaccctagggggggagctggacaccttgtccttcatccttcccaggccatgtacccactgggaaagggcctttgagggatcatcacacactgcagaggtgaggaagggcatggtttcctcttctaagtagcatcggcctcagtgaagcagcctccagaaggtgtcctccctggagagggcttcgatggacttcaatgcctccctctctcctcagaccttcacatttttctgggaagttctctcacgcctgtaatcccagcagtttgggaggctgaggtgggcagatcacctgagaccaggagttcaagaccagcctggccaacatggtgaaaccccatctctacaaaaaatacaaaaaactagccaagtgtggtcgtgcgtgcctgtaattccagctactcgggaagctgaggcagaagaatcgcttgaacctgggaggtggaggttgcagtgagccgagatcacatcactgcatccagcctgagtgacagagcaagcaagactctgtctcaaaaaaaaaaaaaaaaaaagtatttgaagacatgcccatgacacagcctcaggaggtcctgatggcttgcatcctgggtggttgagatacagcttgtttttatacatttttgggagacataatacatcaatcagtatatgtaaaatttactttggttccatctagaagagcaggacaagtcaaagcaaggtgagggtagaaggttagggttggtgggggagcttctaagtcataggtagatttaaagattttttgattggcaattggttgaaagagttattatcataaaaaggaatgtctggtggggcgcggtggctcacgcctgtaaacccagcactttgggtggcggagaggggtggatcacttgagaccaggagtttgagaccagcctggacaaatggtgaaacccgtctctactaaaaattcaaaaattagccaggcatggtggcgtatgcttgtaatcccagctacttgggaggctgaggtgggaggatcgcttgaacacaggaggcagaagctgcagtgggccaagataatgccactgcactccagcctggacaatagagcaagacttcatctcaaaaaaaaaaaaaaggaacatctgggtaaatgtccttgtggagaccagggttttaacatgcagatgaagcctccaagtagcaggctccaaagagaataggttgtaaatgtttcttatcagacttaaggtctgtgttgatgttaatgctggctggctgtttctgaattccaaatgggaggagggtataatgaggaatgtcccaccccaccttcccgtgatgacctgaacaagttcttcaggttaactttggagtgcccttggctgagaggaggggttctttcagatgactgggggggccttataattttatttttggtctacaatacaatatttgttcgtttgtgtctggcttatttcacttagcataatgtcttcaaggttaatccatgtgatagcatgtgtcagatcttccttcctttttaaggctgaatattttccattatatggaccccattttacttatctatttatctgctaatggacacttgggttgcttccaccctttgactactgtgaataatgttgctatgaacatggatgtataactatctgtctgagtcattgctttcacttttctgggtatatacccagaagtggaaatgatgtaggagttaaaaagacattatttaggcagatagtgagggtaaggaagtcctcagtaaggttttccttttaatgaaaagcagccgccaaatcattttcttttctaacaaagggtggccagtaaaatcaagctgcagacatagaaaggcaggctagaagtttgcacaggtgaatgctggcagttgtgccaataggaaaggggttacctgggaaataggcatgttcaaaatggcagtttcatcttcctttttccttgccaaccacatgtgcagcagggggcagacaacatggagctcgtcaggcaaatagcccatttgcataagattagggtggggaagccagcttccctcaagctatgtaaacatcacactaggtccaaccaatctttgggccctatgtaaatcagacaccgcctcctcaagcctttctataaaaccctgtgcactccacgaccagccggaactcccactcaggtgcccttctctctctcgcagaagagagagctgttttcttttctctttcttttgcctattaaacctctgctcctaaacccacttcctgtgtgtctgcatactcgatatccttggcatgagatggcgaacctcaggtgtttaccccagagaatgatgtttcttcggaattgctgaaacatatggtaattctatgtttaatttgttgaggcaccaccatattgttttccatagtggctgcaccattttacattcctgcccattcccaatgcatccggcttccagtttctcaatatccaacacttgttattttctatttttttttttcattagtagccttcctaatgagtgtgaagtggtatctcattgtgattttgatttgcattttcctaatgattgattagtgatgctgagcatcttttcatatgcttattgactatttgtatacatattatctttggacaaatgtctattcaagtcctttgcccattttttatttggactgactttgttgttgttgagttgcaggagttcttatttttaaatatttaattttttttttttagagacggggtctcactgtatcagctcagctggagtacagtggtgagatcagagctcaccgcagcctccggactcctggtctcaagcaatccggacctcagcctcccaagtagtggggactacaggtgtgcactaccacatccagctaattattttttttctttttgtagagatggagtcctactttgtttcccaggctggtcttgaactccttgcttcaagcaatcctcccatctctgcctcccaaagtgttggaattacaagcatgagccactgtgcttggccaggagttctttatatattctggatatcaatcccttatcagatatatgatttgcaaatattttctttgattctccttgggttgccccttcactctgttgattgtgtcctttgatacatttgaaaccctcctgagcccttccctctggtatcctgcccctgctctcaggctgctctatcctttgcatggggttcttgggtatcggggtactcctccaccttgtatcctgctgcctccctgggtgggctgcacccactgaggggtgagggagtggcaggtgcttcattcctctgtgatttctgccccagtcctcttctaacaaacgcaaatcctattatgagaatttgctaacacgttttaaaaatatgcaaatgtattgggagcttatttcagagacaatttttattttaaagaaaaagtaacttatatatttttaaaatctagagaatgtacaactcctctgccacaacgtgagggagagaagtctgcagacggctgactggtgacgactgaacaagacggaaaggcaagtcgctatgcccgaagcctttgaagggagccagcagggtccatgggaggttcaggacacatatctgcagccctgcttctggccccacccttggggaagccttttgcaggtgatcctgggcctctgctggggaaggccccaagaggtgaagcatcctctgcagaggagagagcacatccggaagtagaagacagaccactgtctgggctccgtttaactgctgtgatttgggattgtaacttactcccgtaaagcctcagtttcccacatggaaaatcaaatcgatcattgttataacatttcacttttttgttatgtgatgtaatttacacagtgctttcgtatacgttatccaatttagcgaaataatacagagcaatgcattttgaaaagaataaaatgcttaacatatgtgaggaattcttttttcctttgaaaactactccggatggcttggctattgtttagttaagagaattatacaatttttgagacatggttccttatcttgtgtaggctgaaaggcaattaaacaattattcatgtcagaatctgaggtaaataaaaggctgcttcaaagagtccacttacggagtgaaaagcagttgagtagaaacagagagtggtctgtaatttccttctggaaggaatatccactccatatggcctgaagcaagaatttcaaactcctctgtggggagaaagagacagaaataaaaacttttaagtttttttactccgatttgtcccagccattttctgaacagcctatggaagccatccgctcctctaaacaaaaataagctaagagacagaaagaatgatttgatttccgtgtgtagggatggttcagtcataaatcagtgtattttttccaagaggaaggtgccagcaacaaaagttggtcataaaaaggacattaaactttagtagtctcttcactgttccctcccacatccagttgccaacagcagagacaactgtgagacacagtgaaatgaagtgactgctccactgctgggcaacaggagacccggatgccaggcttcctggcagaagaaatagaaagtcaatagcaaacacagatgtcttcctccctaccacatcacctccacttttcaccatcgcctgtgtgatacacccaccccgcaatgccttcctcagccttttacttctgtttccagtgagtcaagaaaaacttctccagcttgccctgtggagatgaatgagcccataatccacttacacgtgtgacctttacacagccaggacccccatagagcagccaaacatgcagtcttgtaaacaaaaggaatttcaagataactctgatctttcactaattatcccaaagcccaaaggggatccatatacatagtccgaagcctactttaaggaggcatcctcccctgtgtattcccagcccatcccatagtttcccactctgcagctccaaactcaacttgtcccatcaccagcccccagcctctcttctttccctctccccatgccccactacctctattttttattattgcagattgaccaaatgtctatgaagctgcagcaaggtttcttcttttttggagcagggaatggggagtgattgggcttggctgtgacagattgttttggcaggctcagtgggcagaggcggtgaacaccatcccagtaagtaaagggactgtaggagcgtagagttcccttagttcctggctggaaacccagctccctgcctcctcccatccatcaagctgggagccatgacagtgtcagagcctgagctccagcccagacttctgggtgaagtggtcccatggagcaaagcttggtttggaagatttggagaatgggaaagaatgttctcttaccacaacctcttccccactgcggccccttcctaagctgccattgaaatctatttttgccagagcaaaaaatgggggaagtggacagcttctgccaacagtgagtttgttccaagcccaccccacagtcatgggttcctcagagtgtcactgaatcacaggactcatggaaatctgcccatgtcatgaagataaaccactgtgatcacttttaaaatctttctcatcatgtccttgggaagataaaggggtggaactgaacagaaaggggcagaggtgggactttttttcactaaccttaaccttcatgccaagaacagagatctctgtttgaaagcatgtctccgatgaccatttatttgctctgcctggtaaaccttcgtgtaatgcgtggctttaagcattagtcattccctgctgggaaggaggttagaactccagaaacaaggctattgcagaactggactgtgtgggtcactaaaccacaggggaaagggtggagaagcagctggtgtcccgcttaaaggtcacaaagcattatttctactttaatacccagagttcaagtggaaataaactcagaaggttaagatctaagtgaaaattaactgaaggcaactgtgccatttggactctgagatgtgcttgcctgggaaagtgcaaaacacactggctatctttccatgagcacagctgaacaggaataggcattaataaggataaacataaagaaaaaattgctaattattggcagagaatgccaagaaaagttggtggaattctcttctttggggaccctgggaaaagaacagtaacagttaggtacagaggcgcctggaagcaaagaaacttctttccctgggacagtggctctgtgctgtgtgtaaccctgagttctttaggtcactgtagtctgggtgagtgactccagggttgtaggatgcaatagccatgctaatgaaaactcactggttctgagcccccttccagaagtactgtgggtactttcagcctcttttctccctgcagagtctcaaagagctcatgttctgtccttggtgattaatacagatttcttggctcttcccagcctgctagtcagtgaacttaatttgccacttctgttgctaatcataactcttgcctcagcatcaagctgatcatccttgcagctgtagatattggccctcctgcactggatgctcgcagagaggggaaggcagtctcctaatcaccatttctaataaaaaaacgagaggcttgcattctcactctcttgctgagcttctcctgatggagctagccatgaggttcctgatggctggaggaaatatgaggatatcttccccagaacacccaccacacctctctcaacaatcaactcatgttccaggacagatgctgtgaacaacagcaaatgtagagcaggtactagaaactatgatcagtgttttacatagatgatctcattacatatttactgtaaccccatgaggtaggtactcttatggtccctattctacagatgtgcagagaaccagcacctcaactctctgatttcaagttgagaggttggggttggcctggttggctcttcaagtcaagaggacattttattctgtcccatcaagtgacctttgggtcaccaaggcattagttctcagtggatattgctggtgtgcctgacggaggtggccattaggcctccctccattacacatgccgatagctcttggttttcttttatttgcaatacaattcaaaaatgtgaataaaacctcgaaaaatagggaaatgaagtctgaacaataaaaatagctgagatattgagtatttagtcttgccaggcactgtttgccaagcactgttctgtgaggacagtgcctggcaacattaaatactcagtatcttaggaggtaggtactattatcatccccattttacaggccgccaagaggttaagtgacttgcacaagattgcacagctcttaattggagaagctggcattcaaatccagcagtagcatcggcctgttccttgccaaatacaacaaggctttctaccttcttggatgtttatttcctaccacacttttaaaaacaattcaccaaacacataagaagtagctaaaacaaggggctcacattcaatgtgtaatgtagaggtgcagctttgtggttggttccttctttcagttaagtaatgaaaaatgatacaacacataaaaatataacaaaaccgaaagaggtgagtgccctaaggaggatacaaatacagccctgtggaagctaaagtgttggaagagatcctgctgagttaggtcccaaagaatcactaggatctccacgaacagagatgggaaacagacagtagcactgtaagcaggaaaagaacttcgtggtggaaaagtgtcctggggtccagaaatagtgagatactgatatctgatggatcaagtaggaagtcatggatgattccaggatgaaaaaaaattcatagattcatcagaacaattagcaggtgaaatttagcaatattttcaacacaccttcaaaaacacttggtagtggcacatggggcagaagagtcccatatatatggatgtccaggtttacaccagatgtcctggcaacccatcgggttagcaaccctaaccattctcaagatccttgcatggacaataaattatatgaccaccctgtatctggcaaattgaaagatagggcccaacacttaggtgtattaacggtgcttaagaagtcatattgtggccaggcatggtggctgacacctgtaatcccaacactttgggaggctgaggcaggaggagcacctgcgcccaggaattccagaacagtctgggcaacatggagaaaccccatctctacaaaaacaaaaaacaaaacataattagctgggtgtggtggcacacaactgtagtcctagctactcaggagactgaagtgggaggattacttcagcccaacaggttgaggctagagtgagccgtgatagtgccactgcactccagcccaggcaacagagtgagaacctgtctcaaaaccaacaaacaaaaaaccaaaacaaacccacaaataagtcatattttaaaagcctacatctcaatgcctagctaagctttataaagaatgcgggctctttgacacttgtttacaattgcaaccatagttggttttggaagtgtcagttcttcccacaaccctatttggtgtgagccgttttgcacaaggtaacccaactagtgtctgccacagagatatgcaggaaaagccagcctttgatgaacaaatagtccccatctatctggagttaatgtatagtaaagaaaaaacctggttaaacacacactggcataaactgataaagctaatttttatccaagcccacttttggatttcaaacaactgaagtcaaagaagttaattaaaaacacatagagttgtcaatgagtttaaaaataaaacacaaatttatttgaaacaatgagacttaactaactctgtggtagactagttggctagtcttttgcagaagagccaacctatttgtacctgagataaaacatattcagaaagaaggaaaactgcaaagtggtcccagaacagagaaagcaacaaagagaaggcttaactgtcctttcaactttgaggtgcaatctgtctacagggctcccttgggggaagcacaagctctttcttttagtctgattttgttgattgatgctgtgttgttgctggattgtattactatgtgaagttgaaaggcttaatgttaatgtgtcttaaacttcaagacttggaatgcatgatcccatttaaacttgactgttctgggcaatgtgttttgattggctggatgtctagcttgtgcatttctgtcatttcctaatgtgtgtggtatgctttgagcactgcagacaggaaactcactttttctctggctttcttctgatttttctgtttcttgattattggaaaaatgaataaacacataaaaataagaataaagtgtcaccccaaaagtcttatctttaaaataatgtggaatggcaatgctaaaaataaagcaacttgaactaatttccactatgaatagggaacaaagaatctgcaccttccctgattttggattccagattccaaatatttcataaataaaatatggccaaccgcatgaattataaggtatataccatgtgagttacatacacagggagaggttgtttttaaaatttcctgctggcaaagtcagacttatccttctttttttttttttttttttttttttttgagacagagtctcactctgtcacccaggctggagggcagtggcacaatctctgctcactgcaagctccacctcccgggctcacgccattctcctgcctcagcctcctgagtagctgggactacaggtgcccaccactacacccggctaattttttgtatttttagtagagacggggtttcaccgtgttagccaggatggtctccatctcctgacctcgtgatccacccgcctcggcctcccaaagtgctgggattacaggcgtgagccaccgcgcccagccagacttattctcattgccacttttaaacctgtcagataaaaccattccaggatgaagttggagatacgtcatagtacattttaacccatttatgcctgaggttgcaattttttgagtgtgaaaaatcagaccctggtgatgaccttgagcagtaagacataaataactcccacatgcttagtgttccaataatggaacactaggcataaataggttttaatataaaagcttaaaatttgtactccaaagtagggaaaacttgattatattcatttactctctattaggggcatcacatcagctatatttttaaaggaagaaaaagcatgtcatttcctttgtatgtatatcgtctaaacggacacttggaagtcagtattaggtgtcaatgaaatgccacatgatggaaataaaatcatctacatatatagttgtactcctgtaaatacttatctttgtatcctcataaatattatgaaatacatacgtgaaagtttatctcataaataaaatccaatttgttatcagacattgagggtctcagggagaaaaaagaccttcaaacatatttgccttatgcttatgtgattcctgcatccttagcatgtgataagttgaaaccatagcataaaatactctaacagaaatccctatggaaagcaagaaactatttaccctaattagcctagtggcttatttcatagtcaaggagtgtcaaagatattgattttattgcaaactcataccaccctttattcagatctgggaatggagcagatagagtgcctgggtccaagtttaaatctaaaccatcaaaaacaaatacatgagtgactgttaaactctgcatgccaggcactattagatgctagagatgtaaatgagcaatactgtggtgggttaaatggtggcccctgaaatatatacccacaccctaatccctggaagctgtgaatgtaaccttctttggaaaaaaaagtctttgtggatataagtaagctaaggatttttagatgaaatcatcctaggttagccaggtgaaccctaaatccagtgacaagcattctatgggacaaatggaagagccacacacagggaggaggagaaggctgtaagaagatggaggcagaggctgggtgatgcagccgtagccaccaaataactggagccaccagaagttggacgaggccagtaaaggtccctgctagaaccttcagaggaacacagcccagccgacaaatttatttcaaacatctggcctccggaactgtgggagaataaattttggttgttttaagtcaccaagtttggggtaatttgttacagcagtcctgggaaactaatacaaatagcatcccgatatctagttgctgaaggacaatatgcagagggggacaagttagaggtaagttacttatctgaaactcatacctgtaatcccagcaccttgggaggccaagacagggggattgcttgcatccaggagttcaagaccagcctgggcaacatagcaagaccttgtctctacaaaaaaaataaaaacaaaaaaattagcctggtaaggtggcatgagcctgtagtctcagatactctggaggctgaggtgggaggatcacttgagcccaggagtttgagtctgcagtgacttctgatggcaccactgcactccagcctaggcaacagagcaaaaactacttcactaccagcaaaacaataggcagaaaaatttacttgtgtgaatttttgaaaatccaagttagattaggactcccacacatatcttttcccaggccactccgttttggatcctccaactccaggtactggactcctgggctccctgggatttgaaatcaggccttgatactccattttttccaagcagagctttttgagaggtcttgaagaacaggcttgagtagaaagccatattttttgcacacttatttgttgaccgcacatgtggaatatgggctttgaaaaccactctgtgtgttgtgacagcctcagcgtggcctgggacacacccatcgtgaggcttctgctgtgactgagtgtatcaggctcagtagcgagccaggctggactgacatccagagcaagggctgagaaagttctcgagagaaaattcctgtgaggaaggattctctcccgaaggcccagaaactcctgagcttgtctgtgaaatgttacctatatgttcacttttctgagagaatttctggggcttttatcatcttttgaaaaggtttcacagcttaagaaaccacgctgtaagaacccagaatgagatttggtgagcttgacctgttagaaaagcctcagttgtcagagcaaagtaggattccaaatacaaagatgtggctttaacctggcgtgctcctggaggggcaaggctggggctgagggaggatagagcagactggaagcaaaaactagatagctggtcaatgaaggctcaagcagccttgctgtggggccccacacagcgactaacacagcagagaaagctgttccccacctcctccccagccccgggcaaggctttggcactctaagctaccagcagagattggctgcactctccagagtggagcacatgtgagatgcccccaagacccccagaaatctgggggcagaacctcaggaagctgcacgtcctgcttcaacctgaggggataacgaagtcagcagaattcaagttttcaatgttactgaaaactcattttcaccctcaggtgtgggaactttggggccacacaccattatggaatttgacacagaatttatacccccaaagattatttatgttcatcaattcacattagattggtttcaaattttaatttttggtaccatgtggaaaatcccatagatgcctgtagatttagctacattttcctgtacctaaaatggtaacgttaatgctcgttccctaacaaaccccagatactacgctcttccagagcatttcagaatgaaggagaggtggggattataagaatatgcacagttctgccaaccatgactgggcataattttcaggctcctggtagacctccacaggggcggtagtaggctagacaggcctgccttcctctgggcttgatgctgccggcatctctgcttcaggctacaatcagttacccagagccttttcatcttttcactgaggaaaacaagaaaaccagatcccttctgaaaacacttgcaggaaaagaaaaaaaaaaaaagaaagcaaatgcacagtttttgttgtgctttgttgttttatatggtctcaacagaggcaagtaagaatagattatatatttatctagaatgggtttccaaaaaaatggggaaagaaggcttagggagttcttattttgtgatttgtttaaaaaaacaaaaaagctcaagcctcagccccagtctctattgaaaaaaaagaaaaaaaaatcagaaaagaggaacttgttaggaagtggagtgaatgctggcttcccccaggcccactcaaccccatcaccatggagactcctgaaggttccaggaatgactcacgggattcgctggcgaagcctttgaaatggaagcagcacgggagcacaaagatgaacttagtctgcagcccttaaagactatgcctttgcctcctgactgacagcctgggatgtggatggcaggctacagagaacgtgcccttcccttcttccagatcctcattacttgggggcactttgctcatgagagcaaaggtcaaaaaatgtttttgccttggattgggttcttgccccactattggagaaatattgatgtaaataaacccctgcaccccacccccagagtgtgaatacttaaaaggggaggctggggcccttgggattagagagagggtggttttcagaagccctgggctggaaaaaggtgtgggggagctacaggccaagttttttcttgggcagctgaaatgtattcccctggctgtccctctggctacataaaactggctcacattaggttccttcaaaactcaggaatgcagggtgttataaaccggctttgggtttcatctctgctgtagcaaggctctaaattcagagagccacaagaagactcctcaaagaaaagagtcactctctgcccagagttttatccgctgaatgtctgtaaatcataattggcaatttgtggaacaaggagagcaccctgcccggggctgcaatgagctcctgcccctgggaattcacacaggacaagcacaagcatggccggtgccctcgtaaagaagccccgttgctgaatagctgaggtgcttctttcccaagggcctcaactatgcagcagggcttcttacagggagtccacacaaatgtttaagtttctgggcatggcaggcaccctgggagggatgccagcacccccaagtgccagctgccattgctaacccagagcacccggtgtcctccccgtcaggaagctcggcccaggctgagatgtggggtcaggttgggctgcccacccactcacccggcacagccatgctcaccagccaccgtggataacctaaggaggaagagaaacttctctggtagggcccagtccttgtctcagactcaacagcactgagtccaaaactcgagggagtttgccagggttgcctccataacacttttctaaaacagaagctcaccagaattccctcctccaaaatgcatagaaaatacccttctttccctccaaagggagaaccaccgtgaagatgcgtattctctccttccctgccctaaatatacatcctggtgactgcagacctgcttaaccatgaaaacaaatgagaaataaaggtctgagcaaagctgcagtcgcctcctctcaactatttattctgatttctcgacaagtgagttaattggatgggccctgtgacagacattccatactaaaattcatagctttctgccaaaacaacatattgtgcgctgctatattttccttgttggaacttggcgctgacgtgggtcccgagcagtttcatgcggaagcggggagactgaaggcgctgaaacaaaggcgacaccccctgaggctcccagccggcctgtcctccgtcctctgcagcagcacctgttccttggcttttttattgttacttgggctttgcaaggttcaagttcaaagggagccccaggagtgaagaaacagatgccggtttgaggccacaccagctggggcctccctgcagcctgggaagggtttgggctgtctggcggccttggtgggcccagctgcccggctcaggcaggtcttctctgcggagccctgtcccatgccccagtccccatgcgcagggccctgcggggaggtcccgtcgccccaagggaaggacagggccggtgcaggcttagggctgcggagccctaggcggcccagctgatgccaccaccgctgtcctgaaggttcctttccctttcagcaaaagtcagcagctgcctcctctgattcagggatgttccccctctgaaatagcgctctcttcattttccaggaatttctacccgtctcggttccctctatccacctgccaggacccagcatccaccatccctctgcgtcctaggccttttctcctgagattcaaggagcaccgggccgacatgcccaggcccccgctgtcctctcagaagggaggttggccttcgcaccttctccactctgtagccatgtcgtgggccttaaacaggtagagagagaggtaggcttttgctccccacgtcagtccccagaatgctcatcagtcagcaagcaggcaccagcccccagtgcagcttcactaccccacaaccatcgccgtgccagaaccacagactccctccagacagcctccgataagaagctccgtgcccctgagtccacctcacagagccctgactccaaccaacagaactcctgactccacccacaaagctctgactccactccacagagccgtgacttcaccccagagagccctgactacatcccacagagccctgactccacttaacagagccctgactccacccaacagaatccctgactccacccacagagccctgtctccacccacagaatgcctgactccacccaacagagccctgactccacctcacagagccctgactccaccaaacagaacccctgactccacccaacagagccccgactccacccacaaagctctgactccacccagagccctgactccacccaacagagccgtgacttcaccccagagagccctgagtacaccccacagagccctgactccaccccacagagccctgactccaccccacagagttcctgactccacccaacagatccctgactctacccacagccctgactccaccccacagcactgactccagccctaagagcccctgattccacccacagacttcctgactccacccgacagagcccctgaccaccccacagaacccctgacgtcgaccccacagtggcccctgaagctcaatcccgtgtaggccaaggagttatgtgagctcctcacccctgtgctgtcactgtttccctaatggcttcccttagatgacctcacatagcatgcgtcacagactgaaggagcagagtagcatcctctccattccagaggcaaccgcagtggaatgccatgatttgcttatagtttcacagcttgtaactggcagcagctccaaccagggccctaggctcagattccatgctctttccaacctttcaggctcctaaagaattaaaatcagcctggaaagtgtctgcctctgactggggacattcgagtgtgcatatcacccaaagggaagaggcaggaggaaacgagcttctagagtgacagaaggagctgaggaatggagcccaataataaaggaaaattttaaaaagaaaattgacacgagagaagaaagtccctatttagaagaaaatatttgctccatcagagcaaaatgcctctacatttctgcctgaaaccatctatatttctgaacagggcttgctccaccctacagtggaggagtggactccaccctgcagaaccttggtctccagcccagccgtgacctggatgccctttccctgcctctggccagcccagatgcattccttcctgcaaacccagctcaagtacgtcttctccacagcccgtggtgcaccttgcctgcctcccgtgtctcctcctcgctgaagtcctccggcatatccacactatttggggctgctttaattggtcctcactggtattttgtcttgagaaagtcctttggttgttgcatgtgtttctgtttttgccccttcatcagattgtaaagccgtcgaagatggaaacattatcttctatttctctgttggtttccaggaagctcctttctgcaggtcttccctcgacctctcaggatgcacaatctcagtctttcctggcttgcctcagcatttaacacccagtttggagttttggtcctcttagcacttcttgtcctctcaagctacactctctccaggcatcctaacacatgcacatttgccacagctgcttacagctgagactgtttccagccaagtattcaaagccatttcttaacttccaactgggcctttcctcctgaaaagttctgaggcgacttcaactcagtaggaactgaactgaagaaattacctgtctcccagcccagttctttctctggtatcatctgtctttattaatgctccctcatccacccagtcacccagaaacctgggatcatcctagactcctccctcctcatcatcaccactgtgcccagtccttccagcccctctgagggctggggtctgagccaagcttttgactcagagctttccatttactcctctccacaatgctatggagaaagcactattttacctctgccttaaaaatgaagacacccagtctgggcacagtggcttacacctgtaagcccagcaatttgggaggctgaggcgggcagatcatttgaggtcaggagtttgagacccagcctgaccaacatggtgaaaccccatctctaccaaaaatacaaaaattagccaggcgtgatggtgcatacctataattccagctactctggaggctgaggcaggacagtcccctgaacccaggaggcagaggctgcagtaagcggagattgcgccactgcactccagcctgggcaacagagtgacacttttccccccacccccaccaaatacacacaaagacactcaggctgggcatagtgactcacacctgtaatcccagcactttgggaggccaagggaagaggatcacttgagcccaggagttcaagaccagcctgggctacatgtcctaaaacattcaaaaatgagccaggtgtggtggcatgtgcctgtggtcccagctacttgagaggctgaggtgggaggatcacttgagcccaacagttcaagactgcagtgagctgtgatcacaccactgcactccagcctgggtgacagagcaagaccctgtcttagaaaaaaaaaaatgaaatgaggacacccaggtttagaaagggtaagaaatttgcccaaagtcacacacggagtaagtggtggtgttgagattcccagccagatgagctgaccccagaggagacaaacatcttcctgcagtcagccagtacccactcttcacagtacagggcccacgaggtggagaaaacccattttataaggagaaaactgaggttcaaagcaggtggtgacctgaaccaggcccaccagagttacgactgctctcactcctctatagcacaagctacctttgagagaacagagctccggatcatttaagaggtttccttctgttcagtgccaactgagtttaaaattcccgtgtgagttatgattatcatttccattgattcatttccattgattgagaataaaaagaagtggtttatgttgcagcatgaaagatctaaattagaatttttaaaaaaaaccttctagatctggagagctgatagatttttcatttccttgctaagggagtctatgcaagctctctctggaaatcctttgaaatggcttagagacctgatgtagctagaatgagtttggaggaatccaacatgaaggtagcccaatactaggttgcaaacaggctagatgcttttgggtttgtagacatgtttgatttggaactcccagtgttttacatgaaaatcccaaattctggcttcttttgaaaaaccagttgatatgacaacccaagcctttctgccccagttggccacagtccatgctggagcagggtcagcctgcctccttggacagggccggcacactccacttggcctcagcccctccagccagcttacctactgatgttaccttcctgggctctttaggcatatgaattagtgacctcagatgacactggtagggtcaacctttcaaacgtgcacctttccacttagccaaaatctgagctatgccagacattttgttagatagcatcagagcacggactagaagctgaattgctcttgcagtgaaaggactgattcccacactcctattttatccctacatgaaaacatggcaaaatcaactttccttcttgcttaccttctaggaaaatcagaagtattcaccaggtgttgaaatagaaacttatttcttataattgccaactttgctgcactgagtcacatgttgatttctacctaatgaaaaatccagagcaggctggagtctgacagatagagcccgattcgctatttactctggtgctaatcacaatcatgtttacaggaaaatgccctcatctgcttccagcagctccagccactcagccatgtgagcgctgtcttcaaagtcaattgcctgtcattttgctgatttatgttgagcaactgcaaggacccctcgaggtatttgtagctagcttgatgattcccagcttataaagtggcagtgggcagagcatttcagttcaaattcccatcaagacagaatttaaatccccagccctgctgctcatatttgcaatgtgagcactttagataagcagaaaccatcaaaccctaaatgctgggggaaatacaacctggatttcttcaaatggagcctaagcccaaatcttctttcagaccttggataggaaagtgattctaacagtttttaaaagagtgatcacatatgctttttcccaagaagtattaacgactgaggcaagacgggcactatcagattagattggagaagccgggaaacgaatttccctcaccgcctgcctggattcttaacgtttcaaccagcagaatctaatttctttggaattacttgccctctaacagaagttttctttttaaaatgaaaatattgccgaaaagggagacctattaaattactaacccattagcttctggtttagcttcaatcttagagaagcccaattccttctaaacctgtctcgccctacactgaaagtgctggaggtgcagatctcagtgcactggccttggctgctgagattcagggaggttagatggcgggtagagtcacccatgcgctgtgggatgggggtcccttccatgcactctcctggcaagtcctgaaccaccaaaggtgtaagtggatgtatttttcaggttctcccttacagcactttgaagtcaaacacaagatttaaggattgctcacagcctgcattttctgtatttctgcatttcttgttcactcaacgtctcaggtatttaattacatactcactgttagggctcagggaagctgtttagaggttcagctcagccccttcgggtcacaaaactgaaatacagtgacttccccaaagtcagcaaagctcaaggatccttaagaacccagacatgtgagatactgagtaatccaaactgaggccaactccaaaaaagggctccattgactcatctttcggtcatctcgctccagctctcacttagagaaagtgcgtatttcttccatttagaaaagactgctcacgctttccatgtcattacatttctttattcctctctttatattccagctgcctttcttcgtgttttttgtcacttgccctatttagccatctccaaactagctacctgcctccgtgccatggagcatgcttttctgcagctcggcctcacgattctaggccagcttttgcaccccctaccccctccatgcttataaaactgggttccctgctccctttctgtgtgctgttatgcttcagaagcgccactgggtggcagtgtctcagagcagtcctgggccctgcaacgtggctttgggctgggctgctggttgcttgtctgttacagcacaaacaggcctgtgtggacaggcagagcaacgagacagccacagtggtgctctggaaaggatgagtattagatattaaggaaacgagggacagaggtctgcgtactgtgtcctttcggagcttgcactagccacaaggctgacatctgccgtcattctaacaaaggaatctcaaatcctgaggctgtttgggaggtgtccttgaaaagaatgactataaccctttgccctccctgttttgattttcagcctaccattgggccctgattcatccataaaaacaacaaccaaaaaataaaaaaaaaaggcaatccccgtgagcattgtgtgtttgctggacaggatagtaatggcttaatccttctaatggctttggtcactgcaggatattagctattagaagggtctgtttaaaagggggtggtgggggaaggtagggccatctgctgattatagcatgcatgaggaatgaagggaacatttaaagagacaccgtccattgatttagacacaaataattagtttgtagttgaaaaggcatatttagggcttgaattttagtatctgaatcatttgcttaaagtgcaaatgtgatgtctcagactggagatgatcccaggaactatttgattccacctttcatgctttttgtaaagaacttctccggagactaaaaggaatgtggcctgaaatgcatcaacattgacgtcatggcttggagtctgtggaagtcaaaccaaatgtttttattataaacaggtcagcccaggaccaaactgtgaagtacatgtttgatttccatgtgtcccacccccagccccagccttggcctctgcacagaaaatagttcccaacatcccaccaggtggcccagccccctcctcactgactccccacttcaccttcccttccaggcctgacagcaaactaaagcaaaagaaatcttcccaaggatcgtggcatattaggaaatgaatgcacgctctccattcaggaaagctgggggcaggccaacctcacctcccaaacgggaaaagcctagactagaggtgagcagagacctggcttcccctctaggccaggccctgggtccataggcaacaactgttctgggaagtgggaattttatacagcaattcaatgagaaggaagatgtggagggatgtatttggtatcaaatgcatcctgtcatcccacaaaatcaaaactttggtccctgaaccaagagaacataaagccttagggaaagacatttcctgaatattgagaagtgaatactgaataatgtaaggtggcgtaggctgcctgtagtgtcccgggagtaggtgatgcaggtgttgagagacaggcacagagaagccacccagggaagcagagtcatggaagccaccacgggagagatgaaacacaagtcaggtcttgaaggaagagtagatttacctggcaaaggaaaggagggagggcattcctcgaagagcttatattagcaagataatggagaacgggaacacacaagaatgaaaagatggcttacatggttgaagcggagagtctgagaagcgtagtagaataggtggcagtagataagggtaagatggggaattcctgaagttggctttttttagactgcaaggaacagagacacctgatgtacctgaagtgaaggggattgactctgagatgcaggaatgaggcaggaagagcacacagccctgcgtctaaaaacgcaggggcagccacattgccaaactccagggagacgggaatgtagtgtgggagctgagtattttaaaacttcgtaaattaattaaaaatttgaggtatggtaaggcaaacagataggagacaactgccagtaaaaagatagcttgttactcacggtttccaagaggagaggacatgctgtgccacgtggggagggggcacacaggggagctccagagcgagtcgggaggtcgccagagaggctggacctgtgggcgggggcccttattgtggcgcatgctggaaggtgtgggcaaggcagagcaggcaggctcagggtaggctggttttagtgggctctggggtatatgggctgtccttagttagagacttggccctgcggaaggagtgattggggcaggtgaagaggtggctggggtggggctgtggaggggttggtttgcatttgaaaagcacattgtagggggttgcaagttgttttctatctttggaataattggtaaccctgggagggacagtccctccacggccagcaaggcccagatgtcaaagcatcagaatatagaaaataaaagacgcaattactgcaccaagagagcattcagaacacgatgtcactctggcggtgccctcgtctgtggctgccaccagtgctccggattgggtgaccagccctcaaccccacgctgactctcctctgcggctcctgtctggagttagactcccaggagaggatcagcttgtctccgtggcttccagccaggcctggctgctcctgttgggcagctctttatgtccggccgcgcgtgccggctgcccgtgaatcaagcacccactcgttgtctactcaatttattagtgggtctctcggcttggcaagctatactcagagcctcccgttgggggaggcctgcacggggagagacattctgaggattccgagaaggaggaactatgaccagcacctcacttggcttttcccgtagaaagcttttggaagcctggaaatgagtctgggtaacaactgcagaagtgcccaaggatttaaacagggcagtgacatggggaagcatcatttttatgaggaagattaatctgacaataacatgtgggacccactggagagggaagaggatgctacagatcccagcacctgggtggggggaccacgggacagagagaaaggggaggttcccaaagaatggctgaagaaagcattgacagaacttagtgagcaactggccgaggaaggagaggaagaggaaggcacattgagactgcaagcctggtgggtagagaggaaaatgcctcactgacactgacaatagcaaagtatgcaaaaggagcagagatgacggagattctttttagatatataaacttgtatcgggagatggacaccaatagcccccaactgttgctgagtgggaaacagtgtgtctgtagcaatgagacactttgctgagtagacaatttattaactcttactttttttactcatgagtccagtagatccatgaacacaatgaccgcatttaggtttttccaagttttctcagagcccaaagtctaggtcttgaactcatggagatagggagtaaaaggatggttacaagaggttgggaagggggaggggttggggggtggcaggtgaggatggttaatgggtacaaaaagtagttagaaagaatgaataaggtgggatgcggtggctcatgcctgtaatcccagcacattgggaggccgaggcaggtgtatgacttgagctcaggagttcaagaccagcctgggtaacatggcaaaaccccgtctctaccaaaaatacaaaaaaaaaattagccgggcatggtggcatgtgcctgtggtcccagctacttgtgagcttgaggtgggaggattgcttgagcctaggagggtggagattgtagtgagccaagatcatgccactgcactccaacctgggtgacagagtgagactccatctcaaaaaaaaaaaaaaaaaaaaaggatgaataaaaccaagtatttatagcacaacaaggtgactatagtcaataataatttaatacatttaaaagtaactagaagagtataattggattgtttgtaacagaaaggataaatgcttgaggtaatgaataccccatttaccctgatgtgattataatgcattgcatgtctgtatcaaaatatctcaggtactctatagatacacctactttgtacccacaaaaattgaaaattaaaaaaaaaaataagtccaggtgttgggtccagtgtaaataggtgctaaccatacttatttaatgtcttctgcccacctctgtccaagtatgagttttacataattagaagcatgactcatacaaatatatactgagcacctgataaagacggatttcactcacgaatgagggaaccaacagggaggtaaaactgcccaaagactatttgtggaacagacacttacatgctttctcaggaaaggaatattgaaacaggtttgctaagttagctacaaagcaagttattaccctgcagggcaatataactacgaccttttaggttatcttttccactggacagaaatgtttgcatctccaccagacaaaaaaaaaaaaaaaaaaaaaaatcatttgcaacttaacaatctcctacaagttaacctctaacttcacacagtttggtccctaatcaatagttaatagtaggtcaaaccaggtgtactcccctagagaagtgggtgatccttgcacaagcctcttagacaatgtttcaatatgacactgaaagtactgtagtcatccttttgctttatttctaagtttgggataatttctaacttacatcctgccttaagatgttagatttcaactcaagtgttgtttccttaagccagccttccttggcctccctgacaagttcacatccccctgttcacttgcttccacggtgtcaggtatttcgccttctcggcggttactttaaaaattattctgacattgtaaaaacggtaagaaagactttattcaggacaattgcaataggtgtcaagattcttgcaacgggagagagagagatggagctcagctcccaatacgataagaacaagtggagatttatagccaaggggcagagtgaggggtcgatggatagaaaattactaagagaagacatcacaggtaggaggatccttgctaaactgacttaggattcttgctgaaggcagggcagggtgaacaaaactgagggtgaggaatgaggaatttcatcaactagggagagtgatcagatatcaaggatggggcattcttactaaactgacttattcttgctaaactgatttttgcaaagactgggtcatgtaggcaccataagtacagaacaggagccaagctcaaagcttgggcctagttgggaagagtgctgagaggaacctgaccagcttggtcaaggaaagagtctttgtcagttaccactagtctattttttttttcatatggagtttcgctcttgttgcccaggctggagtgcaatggcgcgatctcggctcaccacaacctctgcctcctgggttcaagtgattctcctgcctcagcctcccgagtagctgggattacagtcatgtgccagcatgcccagctaattttgtatttttagtagagatagggtttctctatgttggtcaggctggtctcgaactcccgacctcaggtgatttgcccacctcgtcctcccaaagtgctgagattacacacatgagccaccgcaccctgcccactaatctaatttttatgtatccatgtgaccatggattcacagctgtctccctttctagactgtaagttccttgaggacaaggccattgttgacttctgcttaccatgctctttcagcacctacgatggacttgaggcactcagatgctcagtgaatgaatttactgaataaatgaacgaatgagtgaacgcctagtatactaaagcccagggaatgtcttggaagacaggaaacagaccacacactgctgctgctaattcactagcctggctgtcgttatttctcttctttgtttctatttgctcaattgcaccttttctcatttgactgcctggccggcagtttagctctgggggaactcagagaaaagtcaggctgtttgctccacagtgtgctggtgctgactcagccagccggttctgcctgctggggcctaaacacactgatcaaaatcctggggaaatgatttgctggagccgctaacctttctctctcctgcagatgcttcctggtttgtactgcctgacctccctcaaggttcttccccatttcccagaagtttaggactcccctgccagccttaagttaagaggagacgcaggaggacaggatggccacctgataggtccattgtttactgtgccagggtggaggagggaagaggagaggtctgctgagttctgaagattgggaaagggctcctctttttagtaggcaacctcttgaagaattgtggtctgttttcccaatcccttcacttcaatttccatttcttagtggtcatttctaattagcctcagccagtactagctgtcagacctccctgaccctccttctctcactccattgtttgttccttccaggattcctattcctaaaggctggaggatccagggctcaggccaaggacctcttttctttggacattcactcctgttattgcacctctaggtgacctgacagcttgccaatgtctgttcagagcccagccacctccccagaacgtcaggcttgtgtgctgtgctaggcggcccctgagatgactcccatcttcctcactgcctggtgttcacactgcttcctgagggtgggctggattgcttccgagattaggcctctgtcttgctggccctctcttgctctcccacttgctcactctcatgaaggtcggctactgcgctgtgagccactctggggagagtctcgcatgccaaggaactggggacagcctccagccaacagctagcgagggcctgaggccctcagtccaacagcctaggaggaacccaatcctgccaatagccacatgcatgagctcagaaacagatccgccccagaagaaccttcagataagatcacagctcctcaagttcagtctgtgagataccctgaaccaaacaggttgcagctaactcctaagcagataagctgagccatcagtgctggctcagtctggggaatggacctaaaggtaagacccagctaagccacactcagatggcttcccctacagaaactgtaagatattatttgttgttttaagccactgagtttaggaataatttgttacacagcagtaaatcagtaatactatatttaactgcctacttagcttggatgcctaaagaacatctcatacttaacactgctaaaccaaatcttgatttcctgtcctaagaattgagggaacagaacacaccaaagataaagaaacatagactaagtagaaccactgtgctcacagacagtgccgagggaaatgcaagggctcaggagacagacctagctgagaaatctgagaaggaatcagcatgcatggggaagtcaggaacaacaacgggcccatggacgccagggtgataccccaactcagggggaagctcaggcaaccctcctgttgcttgtctgactacattacatgggttggttgaagtggtaaactgtgaggctacctgcacgacactgctccccagacacacagcctcggctcagcaaggaaggacattgccatcatgacaaaaagctgcagaaactcaacatcaggtgcatgtcatctcaaccttagaaaaccacctaaaactcagtcatgctgcttaaacgcttttttgatgagaatctgaccgagcactgacagcgttaaggaatgctttcagcttcctgcctatgtgggcaagtttggaattttattctgactctccctcaataaaaggggcaaaattagagctcatccccaacatacctttgttccaggcagacatcgggggagaatctccaatctgaaaatttagagataggctccttttgtatgttttgtgtttttgtaacaccctatatgaagactgtgtgcaaaataaattatgttctttcacacatgtgtgctcatttgcgcttcatacaaactgtgaaataaatagaaaacatgcccttatggccattttaagtggaaactgaggctcagcaaagtgagtgacttgcctaagatcactggctggtgtgttctggaacgcacatgaatcaggcttcctgatgttcaagcatacagaactcacttgttccttcacagtggagatcgctgctcaacctttagctacatccactcccgattcatccacttgtctggagaacaggacc

SEQ ID NO: 235 - DNA, 31737 bp, Homo sapiens
gaattcccttttcgtaatgaaggaatttaaattaggaattgaaatccaggaagccattgcttagaagcaaaaatcatatcttagaaaagtttcaaaaatgaaattcccattagtacctggaaatattacatgggaataaataaatatcaaaggtaacactgaaatttccatggtaatacaacatccctaacagatggacatctagctgtgtttgaatgtttctggtatgtggcagttactaccattctacaattttaagctttaactgtagaatatcattaaggtaaccacatctacctctgctgggcttggtggctcatgcctgtaaccctgacattttgggaaagcaaggtaggccaattgcttgagctgaggatttcgagactagcctgggcaacatggcaaaaccctgtctctacaacaaatacaaaaattaactgggcatagtggtcccagctcctcgggaggttgaggtgggaggatcacttgaatctaggaggcggaggttgcagtgagccgtgattgcaccactgtgctccattctgggagacagagccagaccctgtctaaaaaaaaaacaaacaagcaaaaacaaaaactcccttctgaccgctgccttactcaagtaccaggtaaatgaagtctctgctgcatggttataattatctccctttcaagaatgaacagtcctcatttcttcacctggacctcaacaggcatggttgtggcttccaaacctttccaaaagaaaggctgtttgttctttttggtcagtggacatgaccctttttgtcagcgcctggtttttgcctgtgctcagaacccagcatggtattctgcagtgcagactaagtagtacccctgactgggcactgtactcttcacagctcagcctcacattgcactgggttttcctgtcagtgacatcattggcccatatgcattttcatgccatgggtctaattttgaaaaaaaaaaaaaaaaacaaaaaaaaacacaatttctaatacagaatttaaagtttaggacttgtatgttctaaaacctgaattatcagcgtgacaaaatgagtatgggctgttcttcactgccttgcatcttcatggtttccacctgaaatggcaacattttcctggcactaacttagggctccaaaggactgtagctgaacatagatccacattattgttcctctttttttttttttaattttaatttttaaaattttctttttacactgaggagcaagtgtccacttttttaatgagggcaggaaaggagtaggaccacatgaggaagaaattaaagctgtcagtctgtaggctcgaatgccaggaagttcagagaagcctctttaggttcctagggaaaccatgtgtgcttttctgaaaggacctttggaaatttgcaaatggtaggacagacttgtactagcaggtacgtttgtttgcatttgcaaaaatcatcttttacgagcctttagaatattcaaaattttcccagcaaatttgagaaatgttaaatgttatgtagatgtattaaaacaatttaagaattattataatgctttatttatgactgacatttatatggatacatttacattgctctcttattctatattgcattcaaatatagggagtttggtttaatcaatactttatctccactgccaaagtaggtcttgaacttttaaatttaaagtgctacctcagacttttgctatcagaatttggtgccaagattaaaatgtggagagtttataccagtttttataaatatatggaattggatcaaaatattcattgcaatctaataataaataatagttttatttcatgagttagaccttaatcacttaatcttactaatcttgttcttacatgaatgaatagtaactttcagcctggcagagccttgcataaagagaaattggcatgtgtggtagccctttctgcagtaatttttttaaaatccaagttatgttgcttaaaatataatcatattttgccaaaaacatacagtttagacaactctatgttgcttgaaactcctgtatgttgcttgaaactcctgtatgttgcctaaaacagacattaggattttttctgtttggatggaaacttttgtaatttaattcaattttgtcttaaaaggttgataccataaatattttgtaattttagaaaatcttccatttatagaaaaaacattaagataaccattgctacaacttttaagcagcgtgtctatttttaaaaattctgaaaatggcgtatttaacttgtattcatactcctttctctctctcacacacacattcgaaaaaggatagaacaaatgagaaagatggtgtgatttagcagtagtttttcaaaatttatatttttgaaatttgaattgtttctttttttgttcttgggaacataataataaatgcaaacaaagaattttccacttcagtaagatggacgtgaacccagaaactgatgatgttttgtactttctcacttcctgatgttgacattgagaactcttagtgctgttagttttcctcccacgtacttccataacgtagaattaggaagcttattaaactttttagtttatttatttaatatatttgtgatagtagtactttgttgtatcaaatagctaaaatctttgattgattcactgattgacacagtctcgctctgtcacccaggctagagtgcagtggcgcaatcatggctcactgcaacttccgcctccggggctcaagcaatcctcccaccctcagcctcctgagtagctaagactataagtgcgtgccaccacacccagctaacttgtatttttttggtagagacataggctccttatgttgcccaggctggtctcaaactcctgagctcaagcgacccgcccacctcagccacccaaaatgctggtattacaggtgtgagccaccatgcccagacaatttatctcttaaattgattatttgtctttttattattgagttgtaagagttctgtagatataagtcctttttcaaatatgatttgcaaatattttctcccatctgtgttgtctcttcactttcttgatagtgtcctttgtagcatcaaagtttttaattttggtgaggttcatctgtttactttttctttagttgcttgtggtttaggtgtatgtatttgagaaaccattacccaacccacggtcatgaagactggcacctatgtattcttctgacagttttatagttttagctctgatagctggacttttcactcatttttagtttttatatatggtgtaaggtaatggtccaccttcattcttttgtatgtgattatctagttgttctgtcaccatttattaaaagaccatctctctttcctcattgaatcatcttgcactcttgttgaaaatcggttgactgtatttacagtttattgctggactgtcaattttattctgttaatctgtgtgtctgcccttacaccagtataagatgatcttgaatattttacttttgtagtaagttttgaaatggagaagtgtaagtcttttaactttgttgttgttttttataaaaactattaacagttgtttattatcattatgaagtattatatactgtacataattgtatgtgctttgctttttttttttttttgagacagggcctctctgttgcccaggctagagtgcagtggtgcaatctcagctcactgcagcctccacctccttggctcaagccatcctcccacctcagcctcccaggtagctgggactatgggcacacaccaccacacccggctcatttttgtattttctgtagagatggggattcaccatgttgcccaacctggtctcaaactcctgcgctcaagtgacttgtttgccttgacttcccaaaatgctgagattataggcgtgggccactgcgcctggccaatatgtgctgtgcttttatatgactggcattgcactaggtttgtttacaccaacatcaccacaaacacgggggtgatgcattatgctacaacattatgacgtcactaggcaatagggattttttagctccattataataatgactaccatcatatgtgcagtccattgttgactgaaatgttgctatgcaacagataactgtattttattttattaacttttacgttcaagggtacacatgcaggtttgttacctgggtaaattgtgatcctctccctcctcccactctagtctcaactaggcctgtttttcccttctttgtgtccacatggatacaagtcttttatttattatcgaggaatttatagaaaacagaaatcttcccacattttttgattctactatattgatatatttgttgacagagatttttactatatatgtgtcccataagctttaattcacttttaacggtatcactatgagaggtaagtttatttttaggaaaattggacattttagttggttactgcttcagagaaagaagatggtcacttaaatttctggctcatgtcctcactaccaaatgcttccagatggagagcaccaaaatggcagattgtttcttttgagtctagaaaagcactcccttcactaggcttatccctattttggttgaattctacattgccttaatttaatgtaatcaatgatatttatatttatgtaaagaataagctgactataatgaatacccataccctgaaatttaaagtaacacaatgcccagaaagtaagtatgttctggttaatttaattgtctattcttagagttaacctgtcttgtttcaacatttgctaaaaaatcatttttaaaatgttttggttcttttgttgccttaataaatatactttatagtaaatataatttaaatattctttgagtcaggatcttacattattgcagagttttctcaccaacaagaattggtaatagtgatgctagtagaattgaccagccacaccagcattcctaacaaatctgcatggcactcatggtaagcttataaattggccacaacagaaggatgcataagatcactctgaagatcacttctttattttattttatttttaatagagacaggatcttgctgtgtggtccaggctggtctcgaactcctggatgcaagtgatcctcctgccttggcctcccaaagtgctgagccaccatgctcggctgaagattattttctcttgagcagtattctgttctttcattcaagggttcatttatgtcctgttctgagggtagcattttattctgcaagatacaacgaaagtatcagatcactttctcccttgaagccttattggtgatataaaacaaatatgtaaaacgttttagaatcagaagatcatatgattaaatactcgtgagagttcagaccatcagtattataggatttaagaataaggagagattagtgattaccaaccattggtaggcagcttctttaacaaatcgctgcctgaagtggactctgaaggatgagtgtagtttaggttctacagagtggaaggtacaagggagggtgacagagccagtatagtcctggtggaagatagaacaaagtgccaacaaagcaggaataaggatacagtactttgggaaggggaaaaaaatcagagtggtagatcccataggatattgaattaaatatttgccgagttcagcaagcagttgaaagtgttgcggtttttatctttttaaattcaattcctgacggcttgtttacttatatttttcttattcttttatgggaatgtcaaaaggtaaaaattagttggcaattttggttgatgttagttcattgaaaatttgctgggtttgtttaaataaattacagatttagagtataacctgatgcaaagcctcagtgagtatctgggtttgaagtgtcttgttggactttcctgatatattgctcttccttttttttttttttttcttcttaattacatgtgtggttttattttagaaaagccagtgaaggtttgaagagtataaacccaggtgagacagcaccctctatgcgactgctggcctatggtaagttagaaccacatggtttcattaaggaaaaaaatcatacttggcataaaagtcatttgcatcttttgtatctttgtagatttcaagtagttgtttattactgccttggcctattggtgtacatatttgcttattatccccgtcttccaggttccttttgtaaatgaaaatgattgcaagtgacccttacctgtatgtccattgtatattaaccaggtttgaaagttagatttttaatgtgtatgtaccctagttaactaagattttctagatgatgaaactgttactttctctgaatcttactttggcttttctaggagtactcttcatattaaagcagttaatatctctgcgtattacactttgagaattatgtttaagattggatctaggttccccacttgggctcaggaatacacagttcccctttacactcaatttcagttctaagccatcaaacttaactctgtagactctgttatcataaagtaagccggagttttggtgttgtatcctctgtctcacctatttcttctgtgcctttctagacccttttctcccctttttcattactctgctgcattctgccattcatttcctttcctcttcccgcttccctctctgattcatcatttagccaagcacatgcctctccagagccagctgtccactgcttcaggaagaacataagcaccctttcccctccaacacactttgtattaactagtccttggaaatttgacttgaaatcttggcaggaaaagagttaacagtgtttttcttcctgtttagtttctggcttgggctttggaatcatgagtggagtattttcctttgtgaataccctatctgactccttggggccaggcacagtgggcattcatggagattctcctcaattcttcctttattcaggtatgtgtctcatagctgtcaacattcaggcttctagtctaaatgatcattcttattggggttcactggcttaggaatttcagtggattggaatttatgttatgtcttttaaaggcgaaatactctgaggcactgtgaagtaaaagacttaggaaaataaaaattctggttagagtgttttagaattttggagtggaatttagcttgcgtaaaattttattttgctgtactgacaatgttgctatatagttgaaatgttagaagtgaatttttaaaggccatgtgctctttttggtttttatgattttatgttatcttcagtagaagccctaatctataattgtcattgtggtgccttttgtgggaataggcagtaaaatttaatctgaaattgagaggaaaaatgggataatagatgagttgatcatttcatccaaatgatgcagctaaaaggaccaactcatttcaaattgctttttcgtccacgagctaaaaattgtcatcatgatgcagtgatcacaaatttgagagttggtagcgtacataattaacatagatttcttctaagttccacaagaagactcttttaaaaatagggggagaacacccactgtatttttagtcgtttccacaacagttatgccattgaaataactgagttcacatcatgatttgtatcttcttttaataacatctatgctaaagctcctcagggagcttatcctctaataagggaataagagaaaaaaaagtgaataagcatttcagtaacactttaaggtaataatggaaaagatataaagaggtatgaccaatttttaaaaatttctgcagtagtttagaggcatgttgaatgtcatagtgatccccaagcccagtggacactcattcaccattcgcagtagaccctttgtttccatttcagttcaggccttgacatctcctctctggcttaccatcatctgccctcaactggttagtctttccttgacacactattcatgtgaatcctgtatgcaactacctaactaatcttccctgctgcaaaaatggtttggcttttcagggcctagaggagagagtcaaggccctttaaatctggctgcaagttagaggacaagaaagtgtgttaatgggtcatacttatttaatggtgcttccaacatagcaaattatctttcttttgaacatttcatcattggcatatttctggcaaatgtgttaatgattgattatactgagtgttaggtctttaaaacaaatgtaatattagtaaagtctgttagaacccgatgaaaattaataaaacataatcgtaaggggtgttagtgctacagtttgttttctgttttcatatacagttaacacggctctctctccctgctacagttttcttttgatatacaggttttgccagcttttttcactagatggtgctaattccctttagtgacctaggctgttttcatacgatgtttaaaatgattcttttggtagtaaaagaaaaatttgataccaatttggggattgtatttgtaatttctaggaattaaaggaaaaattcaatattcagtaagctatcttaatgtctttagctaagttagcatggcagactggctatgttataaatttgtatctatagaatgaaagaacagtgttgttttatcatttgcaagtttcttactgttataacatcattctttgaagcataaactttgaattataaatttaagaaattaatttgtattacatttaaaaataagatccccaaatttatatttattgtatttatgttatttataactacttgtaattaccatttatttagacacaactcatttttgccaggtaaatccataactttatatgtttagtatactccattacaaatgcctaaataataatcagaataaataaggaatgtagggtcactaattacagattaagcatttttaatccaaaaatccaaaatccaaaaatgctccaacatccaaaacttccttcaccgacatgacgccacaagtaggaaatttcacacctgaccttgtgtgatgggtcacagtcagaacaagaaaaaactgtttcatgcacaaaattattaaaaatattgtgtaaaattaccttcagtctgtgtgtatcagatatatatgaaatgcaaatgaatttcatgttttggccaggtgtggtggctcatgcctgtaatcccaacactttgggaagccaaggcaggagaatcacttgagctcaggagtttgagaccagcctgggcaatatagtgagaccttgtctctactaaaaattaaaaaattcagctgggtatggtggtgcccacccatggtcccagctactcaggaggccgaggtgggagaatcattgagcccgggaggttgagactgcagtgagctgtgatcgtcccactgcaatccagcctgagtaacagagggatactctgtttcaagagaaaaaaaaaaaagaatttcatgtttaaacttgagtcttatcccctaaatatctcattttatatatatagatgcacaaatatttcaaaatttgaaacacttctggtcccaaacatttcagataagggatattcagcctgtagtatatatctgtctatattagtatgtgttaataagatccatactatatgatacctgtgtgtacataggctcttatgttacaaacaggcatagtttataaataatgtttatgtataggttacttcttttttatttgtggttatgttgtaggctagcattaaattttactagaatcattaccatttcttggtaattttgtatagagacaaaagtatgggaattggaatcctaggttcgaatcttatcctggctcattaatttagtattttgggcaagtccatttgattattgaatcactcattccatacataattattaaatgtttttagtctaaaggagttataccaagctatgaaaatagagcccagttaccattcataacttccattcatagtggggaataaagacaaacagctaattacaataaagcatgatcaatgctacagtgaaatgaggaagagccatggggcacaaaggacaggctgtaacccatgctcccaggccacagtaccttggctttgcagcatttatcacaggcgtcattaagtaatggtatagttatttgttgaatgtctttttctccagttgggtgctaagccatgcaagtgcaaggacgacatctgtattgttcactgctctgtcctcggcatcttgtggagtcctttatttctagatggcactcaataaataacttacagaaaaatgaaagccaggcacagcttatggaggaagtgccataacgagtagagatttacttaaagggtgaataatagctaggcaggcaaagaaaggagttgtcagagaaagatgttcgaggcagagggaagaggcctctttcctccaggcctggaggtaagagcagtattgttcacagggcaaaggaagtcttgtccttccatctaatcttcaatttcctgatctttcaggaagggcagaaataacgcctagctcagagttgttgagaattaaatgaaattaatttagagaatatgtatttaagtgcttataagctctaaactggcctaagaatattattaaggtggagaatttagcgcttgagatgagaaaacagaattcagagagaagataatttttctagtattatatagaatctgggtttttcattccgaattacctcccttatgctttagaagaaaaaatgtctttagctagtacctagtaaaaaagaacagctgatcattttattttaaaaaattccccagaccatttcacttctattatattttctagacagtgcacttaaaacctaggcaagcttttaaactttttagccactaaacgtttcacaagggaaaaccaatatgggtcagaccacatatggagtgttgtattgttccaagcattgtgatttaacaggaatactgaagaagtaaaattcatatagaaagaatgttgtcagtatgatagaagatctagaagccatggcctgtgggatatgactgaagaaagaaaaatactgagcttgaagaaaataaaagaggaatgtgggagattatttttgtcccaatttgtcatttcctgtaataagtctcatggtggctggaatgttcttttctaccctttgactttgagctcagtcatgtggcttgaattggccaattagtggttatgatgtaagttagaggcttaaaaagtatttgcatgattggaccttccttcttggactctggtgccatgagaagaagataccttgggaagttaatggccacttagcctggacccttgaatgaatatacccagagccacacagagcccaccccaggagcttgcagcagagttttccagctgatcccagcctttatcagcaatgcacagtcagcctttagacctgtgagcatgagaataaatttttgttactgtaacccaatacattttttatctttcattcacttttctattcgtaatattttaagaataatctctacagtgtggcagtttgttaaagtttagactcgactgaaagctctttgtaagcaagactatctcaatacctacatttccaaattccaaagtagtagagaaagtataacatctcctaatgatacagaaaaaatgatcaacaatagattgtaacctgcagttcttatccttttatgatttcattagaatcttaatttcttgtaataagttgtcacaactaactgctactgtttatgatacagtgatactctatacgctgtatatatcatcgaatttgtatttttcattatctgttttctctttctctttttttctaagagataaggtcttgctctgtcactctgtcactggaatgcagtgttaatgatcttagctctctataaccttgaactcctgggctcaagtgatcctcccactcagcctcccaagtagctaggaccacaggcatgtgctgctatgcccagctaatttttgtattttttgtggagatgggggtctccttatgttgcccgggctagtcccaaactcctggcctcaagcaatcctcctgcctcagcctcccaaagtgctgggattatagggtgtgagccaccacgcctggcttgttttctttatatcaatagtgtaagcctttctttccagctgctcaaataactgagaatagaaaattgtactttttggaatgcactttcattaaatggatatgacctatcatagtctctagtagcttgtgatacattatgaaatgcacacatcacaggcatcagtcttcaggcagtgtgtaagcaggcagctcagtgtattgcttcacagtctctagctgaaagaatgacatgggctgcggctgtaagacttgatggctcttctaggtatgtttcaggccacactgaatcactgatgtctctttcctcacacggatgaatggctaggctctgctgactacctttcggcgcagttgaatgacttgcacttctccattctctatagaccttgtttcttctcatgggtaaaattgtccttattttcgtcagccactgctgcctttatttttagttatttattttattttattttacttttctttttttttttactgagaccgagtcttactctgttgcccaggctggagtgcagtggtgcggtctcggctcactgcaagctctgcctctcgggttcatgccattctcctgcctcaccctccccagtagctgggactacaggcgcctgccaccacgcctggctaattttttgtatttttagtagagatgggggtttcaccatgtaggccaggctgttcttgaactcctgacctcaggtgatctgcctgcctcagccgcccagattgctgggattacaggcgtaagccaccgcacctggcctgtttttttgtgtgtttttcttcttcttcttcttttttttttttttcttgagacagagtcttgctctgttgcccaggctggagtgcagtggcacgatcttggctcactgcaacctccgccttccaggttcaagcgattctcctgcctcagccttctgagtagctgggattacaggagtgcgccaccctgcgcagctgatttttgtatttttaggagagacagggcttcgctatgttggtcaggtttttctcgaactcctgacctcgtcatctgcccgctttggccttccaaagtgtggcctatttgtttatgttttgagacagggtcttgctctgtcacctaggctggagtggagtggtgtgatcatggctcactgcatccttgacctctgagactcaaacaatcctgccacttcagcctcaagtagctgggaccacaggcacatgccactaaactcagctaatttttttttttttcctgtagagatggggtctcactatgttgtccaggctggtcttgaactcctgggctcaagtgattctcctgcctcaacctcctgaaatgctgtacctagccactgctgcttttaattttcggtgttttgggggttttgtttctttttcttcagtgaatttcacagacatttttttttttgtagccacagtgagcaggataccatattacaggttactgtcctgtagatatgattgcatgagacaaaagtcccatttttaaaacatcatccagtatggtatcactcttcactcagccccataggaatacatattttattaattacatctaatatttatcatttgaaagggaaaaaaaatcccactatttccaactttattgctcagtctagccccgccccccggcaacctctcagcttgatcccatgcagctccatggccatgttgggaatttggcctgggaatcccagcatttatcaacctcctccatgcccacttcttaccaaagatgttcttcagtgctgggaccacttgtaccagttcacttttccccctttccacagctctgctaaagacagtcgtaaggttcacgtcagggttcctgcattgccccacttcccacttttaggggaatggttcatactgtaacatgtttcacttactgtgcagtgttccaacactatttcctggaaacaaacttatttgcataaatgtttggaaatctcttgtttctttggaggaattaatcagctttgaggtttactttaatgggtggatttattggattttactgccttttatagttattcgaaaccctcaccaaagacttatacttgaatatttttcgtgagatcaaagtcctttgtttcgggtggtaagctacattttcatctctagtgaggctttctccctacattcagtggacaacaattttaaatactgctgacttcttatcagaaattctggaaggcagtggaacaaggtctttaaaatggtgcactcctgcacccttcctcatctcagttaatggaattccatccttccaggtgctcagttatttcttagaatatttcctgattcttccctttttctcccataacttacatccattccaactgtaaaccttacctgcaatttccatctaaatcttcatccaaggtcttatgggcttagctttgctttataaatggcatagatcaggtttgagagcttgtttggagcaaacatttaaagaaatggtaaatctgattttgctgaaactattctaggctagagacaaacatagaaattaattagttttgtgaagtcagtgaagcattaatagaaagtaatagaatcccgagaacctgtatccattgcccgctgcctgaaggcaggtcccccattaggggattgtactccaggctgccttgggcctcatgatcccaatggcagctctagccagtgagtttaggcctgttttttgttttgttttgttttgcagcatttttgtgacagtagctggttgctgcagggagtttcaaatgttttttaatgtgctacatatagaaaaaaagagttgacttgtggttcttcaaagagccttctcaggatcagtgagcaggagttagagcagggtttctcaacctcaccactattgacacctggggccagatgattcttggttgggggctgacatgtgtgttatggggtgtttaacagcacccctggcctctgtccactagatgccagaagcacccctgtcccccagttgtgataacccaaaatgtctacagacattgacatattccctctatgggccaaatcatcccagctgaaaatcactactgagttaaaagaaggcagatttgggttcggtttgagaaggaactttctcatagtggccatttaatgaaatgaaattggaagtattttggaccatgtgggttatcttcattgtgtagaggacgggatcagacaacttctagcaaacctcccaatgctgactccacagtgatgagctaatttgaggagagtgtttcataattcttcagcattttctagggggactttaaacattaaaataatgtcttagagaaggttatttgattagcaatctatatctatattacagtaaatcaggccgcagaattctcttacattctttaaaacaaaaatgttaagttaaatccccattagagaaagtcattttcaaaagcattcattcagctctggggcccgactcccacttgtgccagctgactgggggatctctcaagagtctggagagtttctacggccaggatggatggaggagtgtctcctgcttcatggaaccctgaaacccctgacctttctactacttagaaaaagaagccaaaagcccattgatcttcacatcctgcctctgggcagctgcggctgagctttggccttgggaagtcctcctttgtctgtggctgccaccacccagcagcagcctttggcttgctctgacttagttagagataccctgcccgtgttaggggaagctaggtgatggcagtttctgtgctggcaggaagccagtattagacgcaattgctgtcttaggccattagctttgcaaggacagaaaaataggcatcgggaatgagggaaaggaacacgtgtgaaaatgaaggtgcttatgaatctgtgtgttagagcatttggggtatattcaggaagggtgaaggagccaaatagtaaatgttgtttctttttttttttttttttgagacggagtcttgctctgtcgcccaggctggaatgcagtggtgccatcttggctcactgcaacctctgcctcctgggttcgagcgattctcctgcctcagcctcccgagtagctgggactacaggtgtgtgccaccatgcctggctaattttttgtattttttaggagagatggggtttcaccatgtaggccaggatggtcttgatctcctgacctggtgatcttcctgccttggcctcccaggcgtgagccaccccgcccggctgtaaatgttgtttcttgaagataacactgaaacgttttgcttagaaataggttagaaatattcactaccaagatactttgacttagaagtttattagaagaggaagtccattatcgactagacagttacagtcgtcacaaactgatatacagtacttgttagaattattccgctttctgattaatgtattacaacatataaaaattatggaagctccttttattaatctgggttataaactaacgttgatattcttatggttaacttagggaagtttttttggcttaagaatattagaacaggctgggcattatggctcaagcctgtgattccagcactttgggaagctgaggtgggcagattgcctgaactcccaggagtttgagaccagcctgggcaacatgacaaaaccctgtctccacttaaaacagaaaaaaattagtcgggcctggtggtgcacacctgtagtcccagctactcaggaggctgaggtgggagaattacctgagccccaggaggtggaggctatagtgagccatgatcgcaccattgcactccagtctgggtgacagagttgagaacctgtctcagaaaagaaaaaaaagaatattagaacaaagcaaatttgggggttagatttactgaaggacttttagaattttatatttaggaacattaactgagaaaggtttagtaattaaaaggttgtactctagagatactattagcaaattttcattactagctggaatttgttccttttactaatgagaagggtttaaataggatgtatgtagctgtagccacgtgtgtgtggcagaatgatgcagatatccgggtctgtttctgttggacctcttaaccaactgcagagggaggaaagagtaaatcccggcattctaacatagcacgtcgtgatagtgaaggctgtgatgaccatcaaagccacccggaaacgagagctgactgcataaatgagccgagtatgaacatagcacggtattttaatacatgtccaagggatctcttctagatattgtgttaataaaatggtaaactgaaaggatggggaaaggttctatgagactgtgtttcatgtgttgtaatagtcccagtggctagaaagtgcctggcccatgctggccactgcagacatacttgttatgtgggttgatgaaagaggggaggaagaaaataaatgtaagagtaatacaaagtcagaggaagaaataatctacaagaatgaagagaaatgcatttttgtttttattttttatttatttttttgagacagggtctagctctgtcacccaggctggagtgcagtggtgtgatgatggctcgtgtagcctcaacctccctggcctcaggtaatcctcccacgtcagcctcctgagtagctgaaactacagctgcacactgccacgcctggctaatttttgtatttgttgtagagacagggttttcttatgttgcctaagctggtttcgaactcctgggctcaagtggtccacccacctcagcctcccaggtgctgggattataggagtaagccactgtgcctggccaggaatgcatttttaagacatagtcaagtacccaggagacttggatataaatggtcattgctggctgctgtctcactttctcacctgatagtacaactcactgagaactctggcttatttgtctttgaatctgtagaccatagcacacggtagctaccacatattaaaaagatatggattgccaagcactgtttttccttgtaacagccctatgtggtattatccccattttaaaaataaaggaaatggaagctcagagagtttaaatagcttgtccaaagccacgcagtggagctgggattctaactcagaaccatctgactctaaagataatatatataatcttcaggccaggctgtctaggtgctcagtagattgtgttgaatgtaaaaaaaaaaaaaaaggaggagggtaggtgttaggaaataatttacggaggagaggtggcatttgaactggattgtaaataaaagtaagattcggatgtggtgaaatggagaggggtggtgctgaggggcagagtcttcagacaaaagggataatctatttaaaaagaaaaaagaaaaccagaggtatagacagagtgaagaagagttctggttttcttccataggatgcagttgaagatagtagagaacatggtgtcaaggtaattggggtgtagattgtagaggtccttgaatgctagtctgaggtgtatggacttgactttggaggcaaagtcaatccatcagacttcttagtaagaaggaccaagaaatatggacctagaatttggaagaaagtcagggctaatgatgtcttgaggatgcttgcctaaaactcacagtaatgctcttttggacaagaggagactgaaactcctgtaaatgagagaatttttgttgttttgtttttgttttgttttgtttttgagatggagtcttgctctgtcacccaggctggagtgcagtggcactatctcggctcactgcaagctccgcctcccaggttcacgccattctcctgcctcagcctcccgagcagctgggactacaggtgccctccaccacgcccggctaattttttgtatttttagtacagacggggttttaccgtgttagccaggatggtctcgatctcctgacctcgtgatactcctgcctcggcctcccaaagtgctgggattacaggtgtgagccatcgcgcccagcccctgagagcatttttaaatgaactgtaggccttgactataggagcataattgtgtctcagtgtccctggtaaacacttctttccccactcagtattggtcgcaaagaaagaacatccaattggaaaaggcaatcgggttttattccctggccagaaaacggagaaggtgagctcttgtgctaaatgtactttctccccaagcagtagaaggcatagggggactaggtgtggggcgggaaaggaatgtgagcatgtatgggatgggactccagacgtgaaggtgctatccatgaacatatgccttcatatattatatgtgcatgaaatggcagggattttctttcaggggagggagttttagcattgtaaagatatgctgatgatctaaatgcaaataggagtcacctattccagtttgtgctggttttgcgaggtcttcctctggtatctggtcaggggtcaagaagctctggtgccatctcgagccatctggtttctttaagcagctgtgcctattgataaaggaactaaagaaaaacagttaaaaaaaaacaaaaacaagaactaaggacctttcccggttatttcatcagggctgccctggtaacatcaatattcagaaagaatggcaaacataagctgccaaacagatgacaccttaatggtgtcattgctttctcttgacatttgattgtcatctagattctgaaaaacccttagaaaatgaacaccttatgatttctttaaaaaatcagtgtttccatttgtgtcagtttctgtcttgatcttttctgacacaaaaactttaaaacttaaactgcactcctgggcatcttcagcggtctcagctccccgccgtcaccaagcatctctctccagggaggcctccttttccggggtcatcaccggggttaaaatacatcactttagcttcatctgccatagcgtcaaaactttggaaactgtttctcttctaatttagttaaaatatctaccaccgtttactgaaataattacacgtttacaccagatataacagctttctttcatcacaacagttacgtcttttagttttgcatgttttagaattcatatcaatgaaataatacgcattttttcacgatacggttttcttttctacataacattagattcttgagataatttatatcgtagaccatatagtattccattgtgtgaatagagcaggatttatttatccattctggtaatgatggacatatttcattattacagacagtgctgacttaaacttatatatgctccttgtgcagatgtgtacgtttctctagagcaatggctctgaaacttgaccgtgcctcagaatcacctggagggctgtttaaacacggattgctgggctcccaccccattgtttctgattcaggaagtgcggggtgggtccccataatttggagttctaacaagttcccaggtgcagtgatctattaatttcagaactaattgcttcagagtctagctctagctgcagaattgctggagtgaaatagagaatgcaaattcctctttaatttgtaatgctagactgttttcctatcagcagtatgaaagagagttgtcagacttgaatttttgccagtctggtgggtgttaatgatttcttattatgtggctgaaagaggaaatctagatgcctttttattttccatgttaacctttgcagaatatatagggcttgcccactttaaataaagactgttaaccagtacacaagatacacagacaacatacacacagaggtagtgttccccagaaaaaacctggtggtgctgatcaaattcagtgccagttgcctaagaagcattgtagataattactgtgattttaaatatttttcttttctttcttcttcttcttttttttttttgctctgttgccgaggctggagtacagtggcatgatctcagctcactgcaacttccgcctcccgggttcaagtaattctcctgcctgagcctcccgaatagttgggattacaggcatgtgcctcccgaatagttgggattacaggcatgtgccaccatgcctggctaatttttgtatttttagtagagctggggtttcaccatgttggccagctggtctcaaactcctgactcaagtgatctgcctgcctcggcctcccaaagtgctgggattacaggcatgagccagagcgcctggccatgattttaatatttttccattgctctttttcaaaaggatccgaggaaaaattccactttagtgaggagccttgtttaaacagaagatactccttttcattgaagtctctctttactcgtgcagaaggctcactgggaaaaagctggctggacatcacagtaattttattgtattcctcagggaagctgcctgaaagccagatcttaggcgaccttttattgaacaggtttacattctagacaagaagctgtggcagtcagtcccctgttccgcagtgttgctttttgagtgtgtcaaggccctgtttctgtcaggtggtgttaaactctcttgctgaggtgtggtggacaccccgagagcccgtgcacagtgccagggtcctcagtggttctgatacctgtaggagtgacactaatggtcggctctctttcagctttcatgacgctggtcattatcttgctgcatgtattctggggcattgtattttttgatggctgtgagaagaaaaagtggggcatcctccttatcgttctcctgacccacctgctggtgtcagcccaggtgagtgttgccgccatgctcagactgtattctggaactcaagtctatgtatctaaaatggtaaattctactctagatgaaatacacgctcatgagaacatgaggaaattcagaaaagctatttaagtgaatgaatgagtcatgtaagtcttaccacaaaaagaccaccactattaattttttggtgtgtcttattgaaatatttttttccctgctgtttatttgcagtgatttgtctctctctaacctaggtcagtttggaaaactgttcattctctgtgacagctgcgtggaaaagttgcgtattccagactcggcaccatgactggaccttattcctagctctcgtataacacatgtgtccttggctagcatattttatttaatatagtttttatctctctctctctgtttctaattagagtatgataatcaaggatggggccttatcttcaatcttcgtatcctcaattcatggcacatagtaggtggccagtaaatgttggtgtatattgaatagttgatactattctttttaatgattaaaaggaaagaacctaggaagtttgaaaagtatataccaaaatgttcatagtagttctctgtcagtggcagatttcagagaatgattacataattgttttattaaaataacacacctacagaaaagcacacaaatcagaaatgtacatcttgatgaattttcacagtgtgaacacacctgtgtaactagcacctagatgaaaatcaaaacattctcagcccccaggagcctccctgttcgaccagtcactgcccccactgagggtgaccatgacgctggcttcaacaccacagcttggtgctgccttttggtatttctgtcaacagagtcacacaacgtttgctcttgtgtctggctcctattgctcagcatgtttgtgggattcatcttcacatcactatagatggctcactcattgctgtatagtattctaccatgtgtctataccataatttacccatttgacagcagagaggcattgatgttgtttctagtttgagatggagtcttgccctgttgcccaggctggagtgcggtggcacgatcacggctcattgcagcctcgacctcctgggctcaagtgattctcccaccacacccttccaagtagctgggactatgggcatgcgccgtcatgcctggctaacttttaaatttttttgtagagatgagctctatgttgctccggctggcttcgaactcctgggctcaagcgatcctcctctctcagcccctcaaagtgttgggattacaggcatgagccaccacccctggctttctcattcttatctattgtgaatggtactgctgtgaacgttctaatgtatatctcttggtgaacacacacacacacacacaacacacacacacacacacacacacacacacacacttcttttgggtatacgcctaggagtgggactgctgggtcatggggtgtacatgtgtcgactgttcataccactcaattttcagagtgatggtatcaccttacactctgccatcagtttacaagttgtggttcgtccacctcctcactgcattctctttattgttagtcgtcctgctggctatgtcatggtatcataaatacataaattgataaattatagtaaaagttttcatttacgtttccctgatgattaataggttgagccccatgttgtgtggctccgttgacagaaataccaaaaggcagcaccaggctgtggtgttgaagccagcgtcatggtcaccctcagtgggggcagggactggtggaacagggaggctcctgggggctgagaatgttttgattttcatctaggtgctagttacacaggtgtgttcatgctgggaaaataaggttgagcaagtcttcagatgtttattggccattcggataattctttttgaagtgcctgttcaaatcttatgcctattttctttttgatttttaggagttctttatgttttctgtaaaagaaaaaatcttttgtcagatgtatgtattgcagataacttctgtggcatggtttgtctttacattctcttaatgtctttcggtgaacaaaagttcttaattttatatagtctgatcagtttttctctttatggtttcactttttgagctttttaataaatattaacctagctgaattttaagttttaaaatttgttctatttttctcatttttgggttgtaattttctacaacaatcatgtattgcttttgtaattgtttaaaagaggaaaaatgttttttaaagaagagaagaacaatacaaaacagtgcagcactctgtaaaatgagttaaaattcagtggatttgaggtatagaattattgtgaagaataatctagaaaatgctcaatgcctgccatgcccacggaggcctcttgagaagagcagtctttctgcataaggtgctacctgtaaaatctaccactttcttcaggccttctttgacagccctaaggagatcaccttgtttttacccatcctagcctcatcgcaattataattatgctgtcctagcattcatcacaatttgtgactaattgtttcttcattcattacctgcctcccttactagtacagaacctccattaggatagaaactttggtctcaccaaggtgtacacagtacctctcagcattccattagtgttctttaaatgaatacacttttggaacccacagcaattgtgcaactgaaaaagactattccctcatgttcccttgagtactaaggattcatactaaagtaatttggagttgtctcactttcttgcaaattctaagaaccaatttaacacagaaatgaatagaaactagttacacgacatgcatcttgtattgtatattccattaggttctgcctaatgactgccttctagggttaccatctgaatacagcaaaacacgggacccacagtatctgctgaccagcttagttctacatgcctcagggccttaacgcatgacacacatcatacgtttggtgaaacacacccaagttcttgaaagtattccatgcttccctttatctttggttattccacatgtttaataagcttgctgttattacccaagctgatttatttttcttttgcagaccttcataagttcttattatggaataaacctggcgtcagcatttataatcctggtgctcatgggcacctgggcattcttagctgcgggaggcagctgccgaagcctgaaactctgcctgctctgccaagacaagaactttcttctttacaaccagcgctccagataacctcagggaaccagcacttcccaaaccgcagactacatctttagaggaagcacaactgtgcctttttctgaaaatccctttttctggtggaattgagaaagaaataaaactatgcagatatgcgttccattcacttggctttcacacaactgctctccgaaaggggtgctcagtggtgtgcgtcctggctgcacgagaatcacctgggacagtgtaaagccgactgattctgggctccaccttccagagctaattggcctgggcacgtggtgagttttaaaagcttcccaggtgattctgatgtgcagccatgttgagacccactggtttggtatccaaataggagcttcctgagaacaccttaagtggatgagaatctggtctttagctgtctcctaactcaactcgtgctgagcaagtaagtatctgaatgtcaaatcctggttatcttttatcttcctaagttctgaagtcacaaaaggctaaagggctatcacccctgctcactgtttgcgtgtacttcaccatcttaggagaacacggtaggttgggcttctaaatgcaataataaattacgctgactgtggtaacttagccaaagtaagatactgattaagccgtatttttctgaagtgcttccattccaggttttgctttctgaggcattacattgtttttgagtatagattacattttattaactaaaaatgattgttttgtgacttccttgggaaggtattttaaaatcaggaatttttatgcaatgtctataagcctgtttaaagctttccatgggctctgccccaaggccgttggctgcagcgttcaccatctgagtgccagttgctggactagttgaggtgaagtgcattgttttctctctgagcagctgtgcggggagctgagtgatgtgccctgggacaggcttcactggagctggtggaagtataaccagaagcacaaggaaatgagccaaaagggtgtcattgacacttttcatttgctcctgtgatactaacaacactttcacccaaatggcttaatgtaatattggaaatagatcttaaactgccaaatctcacactattgcataatccatatgctctttagatctagtcagtgtctctgggttttggtagcagatacagcgttccctttacaggaatacccaaggtgttctttcagcttccagacaggtcctttgatttcctttataaagggaaaattctggcaaatcgtgcctttactattagaaattgttcccagttgatgtcttttggggagctggtggcatgaaatgcaaatgacctatacattaaagtgatgtctcagtgaataccatacatgcagtagaacattcagaagagaggagcagcaatcctgaggggctgggggagtgacagtggcaggacggatgggcgggtttgacagattgtggtgggaagaagaatgatcatgtttaaagctaacatagccagtgttttgggctagccacacatcattccagagaccaaaaccttactcatgaactagacctttatcgatatcagtgaacccccatgtttaaaatattagaatgtttagagataaaatagagataatagagataaaagaagaggagggcttctatcaatgctgtaaacagtctgataagcgactgtggttattcccctaaagtttacttcagcactaacactagtgcttccgctggagtttgcagttttccagctttatacaggattttcctttgactggaagagtcaaggatatagagactcaacagtgacatttattgtacaacatcaaggggaataggatactcatcaaactgggattattcttatcaaaacatggtcttctttgaataagaaaaatacatagttggttattatggacttaaaactgtgttaaatggatattctgataaaatatttgctgctctgtagagtgtggaaagtctgagaatattagctttactcatcttgagctttgaggatgttctctgtacgccgatggtttcatattaactaaaaaagctgggtattgtaaaatctcatttataaaaactcagatgagaagaaaattttctttgatggtgagactgttgtcttagttcaggaaattatttaataatcctttgttacctgtgaatgaaggaactttgtaattctgatttatcgtaaaacatgagcctttccagagtcagcttagacactgttgtcgcaaatagccatgctttgccttatgccaaggaggcccagagggagggcctagtcttcctctgttgctgtacatatattgaaatgcttttttttttttattttgcatttgttatctataatgagctttctgagccctgatattatgtgagacaaacaggagttattgatgttatacactcccttccattcaggattttctgcttggagggaaatatgttgaccttagagaattgtgaatattgttgcaattcttgaatatattaccatgtgaataatagagactgtgttgctctctagtataagctatatttatttttgattcatttgaattactagttataactggagaaattttgttacctctatcctggcttgcctgactggctgtataatagcagcagcctcttttagagcatcttaatgaaaacatggatgaaaggaattaatgatgatatctgcagactgcgtagaaaatggcttttgttcccagcgttaacattttcttctcaatcacatttcaatgtttgtggagagtggcagattcacaccagaaacactaggtgttcatatccatagcatggatgcagaataagcagttgggagagaagcttcttcctacctggtactcctcccattcacctcagcccagccccagacaggcgttagcattcagtgtgggccctcaggcagccctgaagcctggctgggtcatcagatgggggcagcctgtgacgggcaccagcggcctgattccagggaagagttcctggagggtgttggctgtttttgttagctcagtttttttctgggctccaccattcctaactccaggtagacaagatagatgtcacacacaacaattttaaagtattttgcttagtgcattttgtttatgattgcagtgtttgtttcttatttaataggctttttacttcattctattaaattttagtgtttagaagaggcgggtactgtcactgtgtaaaatatgtaatattttatatgttataccatgtcatatatacttgcaatatcagaccttgcattcaatatacaatgcaattgactctttgcagacctgcatttttcagtgaacaataaaaagattgtctggcactcctcatttcctgtgtttcctgttctgtggaatggtgtatccttcagtatgttactaccgtgttttgtctccttatgaaacttggatgtacattctgttgtttatgactgatcagttcagagacttttttcaaagagaaattctttatctgatttaaaactcctaaggcttatttcatatctgtgtgtttaggagtagtttggttcagagcatttccttgaggtatcttaaaccaagccgggggaatcctcaaagatcctggaagcttgctttgcaaaatctcctaattgtaaaatggtgaatttaaagaatgtttgtataatagtggctaaggattggagtccggtgaagaggagagtacaatttagcttttacctggtgattctgagtagcctatagagtccttttctctttctttcccttggtgaggagacagtgcagctaaagggttgagcttggcccttgccatcagacaggatacataggggattatgatacgatactcaaaaccatttgatgcttgttcactctggcttgaaatgaggctgttgcaggctatgttgatgacgttattggatgaaacgttctcaggtcccaagggctctttgcttctaacctgtaaaccagtggaagaggtgggcattcctcaggtatcagcccagattcctgtacaatttcattggcccttaaacactgaattttggttctaatttaattgttacttgtttggcatttagttggaatggagatttccctatgaccagcctcaacacatgagaaacctctaatggaaagaagtgcatattttactttcacctctttgaaaatgctgaatagaaggaacctctggacaggttgtggtcccagtctcaatagaagaattagatacattgtaaggtgaccataatagattatgagtcccaagcagatcctggctttaatgctcaattaatttataagtggtacttgttgcctcagtgtggatcgctgtaaatccttctagctactagtaaaattacacattttttagagcttgcacaaaatcagatgaagtttacagtgcttattcagggcttaccatgcacagaatactgcttaggcacttcaaaaggatggaaaagaacgagatggtggggatctttgtccttggaaaacatataatctaactgcacagattaaaacacctaagtattattttaaggcaactacaaaatgcactacaaattatggaataatatagaatagcttgactactaagatgatgcttaatttagaagtggatgaagggcactgggtagtggatatagataggtgatagctgaggactgaaccctgggggcagtcaattgaaaggttggaaaggagagaagaaggaaggaaaaccaaaggagtgcagtggcttgacagccagtggggaaaggatgtcaaatgctgctggataatgggtaagaagaggagagagaattgattgttttgtatggagagatggaacttgctggtgatcttgataaaaacaagatggaaatcagagtgaacacctgaatagaatggattgtacggaacaggagatgaggaagtagacacagcattgagaacacaggtattgtagagcagtgggatgatgaacctaaggaggatgtgggggaaagagagtttttttttctttttttccttatgatgtagactgtaactgtaactgcatgtttatgttaagataagaatgactccatagaaaggaaaaaatgacgtaggagagggataggatagttgccaaagcaaagacctgaaagagggaatagagagggaaattcttttatttatttattttgatttttttttttttgagacagaatctcgctctgtcaccaagctggggtgcagtggcatgatctcagctcactgcaacctctgccttccaggttcaagcgattctcctgcctcagcctcccgagtagctgggactacaggtgcgcaccaccatgcccacctaatttttgtatttgtagtagagacggggtttcaccacgttggccaggctggtcttgaactcttggcctcaagtgatctgcccacctcagcctcccaaagtgctgggattacaggcatgagtactgtgcctggccaagagagggaaattcttaacgttaaatgcttatattaggtaaggaaaaatattcaaaatcaatgacctaagcctctacttaagaaactcgataaagaagagcaaactaaagctaatataaggagaagaaatgaaatcataaaagaacaggaaccaaataaatagcagtaaaacaatggggaaaaatgaaacaaaaatctggttctttgaaaaaaaccaataaagctggtaaagctctggccagatggaaaaaagagaaggcacaagtatcagtaatgacaggagacgtcactataggccctacattattaaattaataaaggatagtatggataactttaatgccaataaattttaaaacgtaaatggacaaattccttttttaaaaaaacccacaaaattcactcgagaggccgaggtgggtggatcacctgaggtcaggagtttgaaaccagcctggccaacatagtgaaaccccatctctactaaaaatacaaaaaataaaccaggcgtggtgatgggcacctgtaatcccagctacttgggaggttgaggcagaagaatcacttgaacccagaaggcggaggttgcggtgagctgagataacaccattgcactgcagcctgggcaacaagagtgaaactccgtctcaaaaaaaaaaaaaaaaaaagaaaagaaaatctgcatatccttctatgtctgcagactttgttttttcttgcctcttaatatgccttgtaattatttgttgaaagctagacatcgcctcttgggtaataggaactgaattttaaaagccttgagtgtaaattttatgttaatctaggtaggagttggattatatttaatgtttgctgtggctgttagtgccagaggcttcgaattcctctggtggtcttgtttttgtctccccttttgactgtggagttccctcagtgccccttttcagagaaagcctgtgtcttgcaactcgttcagctgtaatccactgtaaattaacactagagccctgttggtatggcagtgcgatgtggaggaggggacatgtataataataaaatt

SEQ ID NO: 236 - DNA, 31737 bp, Homo sapiens
gaattcagtggtaaatggaacaaacaagtattcttactttcaaagagtttacaatttagttgggagggagagatgaagtaaacaagggtataagtaggagtagggggtgagagtgggattttattttggatcaattgaaggaaacttaagttctcattccagatcagcttttaaggatgacataatttatgttttcatgaagcctactataaagttgatgatgggaaatataaaattcaagaaaaggggtgggaaacttaataatttcaagtgtgcattggtttcctttgtaactgcatttgtgagcatgtatttactatctgtctataaagctgaaaggcatactgttacattgtttactgattatgtaggtatcttgattttgtcagtctctgatgtccatgtaagagagtattgtacatgtctttggtatccctaatgctattcatagtgttagccatatgtctgcatacctgaagacaataaattattgcttatttttacaaatcgtttcccttaataaagtgtttactttgtgccaggcagtgtgctatatacttaacatttcattttctcctttagtcttcatgccaacttgagatgttagcatcagagataaaggcttttgagaggttaaattacttgttcattgtacatacagctgggaagtgactcaagggggatcaagaactttgttaactcttaagtgtttaattagaaaagtctctggggacttctcgaggctgccaccccgtgatgttatctcatgggtgatataatggctaatgttttatttttcttcacacatccatgtgttttgaaatacacctgccgtgtgtttcttgttctcagttattttcatccatgaaacactttttttttttttgagatggagttttgttcttgttactcaggctggagtgcaatggcacgatctcggctcactgcaacctccgcttcctgggttcaagcaattctgctgcctcagcctcctgagtagctggatttacagatgcccgccaccacacctggctaatttttttgtatttttagtagagacagggtttcactttgttggccaggctggtcttgaactcctgacctcaggcgatccacccacctcagcctcccaaagtgctggattacaggtatgagccaccacgcctgtccaaaacactttttttaaagataaaaaagaccttaattgattcataattaatttagaaatcttgaggtttttttacttcatatttactgtggcaatttttggagcaaaccttcaggctaatagctttcttgtgccgtttgtagacatgttagtcaaacagcaagccttaagtgcatacctttgtgttactgttttttatttgagggacataattaaaaacgagagtacacaagcactttacatctgaaggttccggaaccttcctgcccaacttggaagtagtttgtataagcataagaacattttggtagcaatggtagcatccaatccaaggaaacataccttgtggatatctcctcacttacaaagtcatggatgtttggctgtatatcctattatgggtcccaaaccatgatacaagtatttaaagaagttgttgaaaacttggatctttttccacttacttacaagttggttggcatataaaaatcaaagctttgtttaggtgtatgtgagtgacccttgaggagggtgaaaacaagtctttctgggtttttgtttgtttttttatacctgtatttttgaaaaattacaaggttgtccaaactcctgccaactgaaaatatttattaatttattaatggtgagtttcttcgatgatccagatacattttctcaccaggtgtggtagtgcatgcctttagtcctagctacttgggaagctgagacaggagaatggcttgagcagggagttgaaggctgcagtgactatggtcctgtcattgcactccagcctaagcaacagagcaagactccatctcaaaaaaataaacgaataaaataagtttttaggagtttcagttcttctggaagttttctttaaaaagaaactgatgttacatatttcagttctgtgtaaagtttggcctaggtgaaggattttttactttacttttctaaggagaaaagctgatttggggagtattagttaataacacctttctgctcatcagaaacttgtgtgtataatgcttccatctgttgaaacttgtaggtttttgaaaatttttcatatgcagctttcacaaaagattatatttcgttggcacagtatacagcaggtttcattatataatacataaggtttaggaatgttttgtagcttaccaactgaaaatttggcattaaatttagtgcaaaaatcaaaattattagatgtgaataaacagtaaacagaaatgattgacatttgagataaaattataaagcattaaaccttacatttaaagtttcaagtttccagtaaaataaagtctgttcagttaacattatacaacacaatcttttttcagggaggcttgtggatcagaatctgaacaaaattgggaaagatgaaatgcttcaaatgattagacatggagcaacacatgtgtttgcttcaaaggaaagtgagatcactgatgaagatatcgatggtattttggaaagaggtgcaaagaaggtgagatgtagattaaataatgcttttaatatagaatgttttagaccagaaacaggaaatatttgttacattgatgataaataattttatttccttaaagagaagcttttgtgtacgtgaagttaatttattttgactgcagttttcatgctttctttgctgtgaatctaagaagctgattgttttgttctctagactgcagagatgaatgaaaagctctccaagatgggcgaaagttcacttagaaactttacaatggatacagagtcaagtgtttataacttcgaaggagaagactatagagaaaaacaaaaggtaatttagaaataggtttgggttacatgaaagctttattttactggaaacttggaattttaagtgttactgtaatgtcttataattttgcttaaaacagtagtcatttttgcttattcacatctgaatattttcatcattatgtaaaatttaatgccagtttttcagttggtaagctctgaaatatttttaaagtttttgtaatgaagtttgtggtatatgtttacagtgaaatatattcttgtatgggatgaatagtaatttgggatggtaacctgattcattttattttaaacagcagaattggctggtaataaagggaaaaatttcttaacttcataagtaatacttggtaatatagagataaattgaaaaatacccagagattagaagaaaaaaataattctacccagtgtttttcttgttaatatttaggtctatatcttcagaattttttgtaggctaattatgtgtctacatttttctcctagtttagatttataccaaacattctgtagcatttctccctcatttaacagttgttcctttaagcaagaaatactgaatgcttactctgttgactagacactgtctcgtgttaattatatacataatattgagcaaagtatcatagtctccaccctcatagagcttatagcccaggattttgtgaatatctttacatttacaaacatccttcttgatgatgatttgttactgtgtataataaaagttggtgatttgagttgtttcccatgtgctagattgcattcacagagtggattgaaccacctaaacgagaaagaaaagccaactatgccgttgatgcatatttcagggaagctcttcgtgttagtgaacctaaagcacccaaggtgagttgactgacacagcataaaaatatctaaaaattttgaaaatgtaatttttttcatatattcttgcaaaaagattgataattagattttgtgtttcttttttttttttttttttgagacagagtctcactctgttaccaggagttcagtggtgcgatctcagctcactgcaacctccgcctcccgggttcaagcaattctcctgcctcacccttccgagtagctgggactacaggcacccaccaccacccctggctaatttttgtaattttagtagtgatggggtttcaccatgttggccaggatggtcttgatctcttgacctcatgatccgcccaccttggtctcccaaagtattgggattacaggcgtgagccactgcctctttcctacattttgcatttctttagagtgtactctcttctgtttttagttaacatttttcaaaaattaattttgaatctgtgcatttaaaattaagatataaattcagttttattgaaagatgcattcagttgcttgcagaattggctgttgtggtttatgaagtgaggactaaggatacatttaaaatgaaatttcttttttatggataacacttatttttgtttttctttaggctcctcgacctccaaaacaacccaatgttcaggatttccagttctttcctccacgtttatttgaattactggaaaaagaaattctgttttacagaaaaactattgggtacaaggtaattgaaattatctgcctttctgttcattcctatccagaaattatggaaggtataaacattagttataaatatttatctaatttggacctagtgtgaaacaatactgctttagcctagtctagttgtatgtatgaaatacataaacttgggtctgtttttctttaacaagaaaaaataagacttcatgaccaatctggtttgtttttaacataatacatgcaatgtatcagtatattttctttcctggttgaattgaaacttgtgaaatgtcagttagttggttcatcacatgctctttaaaatttactgatttgatggcatagaaaaatatcttttaggtacctcgaaatcctgagctgcctaatgcagcacaggcacaaaaagaagaacagcttaaaattgatgaagctgaatcccttaatgatgaagagttagaggaaaaagagaagcttctaacacaggtatagcctttaatcagtacaaactttagtaacagtttgttgtaaaggactgtgttaggttatgttggggcataaaaataaatacaagtttctgcttttaaagatggaataattggagacaataaagtatgggcatgtggataaatgctccatctgattgtcactagttgaggtagttgagaagactacagattttattactctggctcggtagagtgggtatcttttttatcaccttactttgaatgttcccgtctttcctatgaattttccacattgctacccagtcaccattttcaactataaatcttggcttggttattttttaaacatcctttggtgttcatcaaggtctttcagaatctggcctttgacttacctttaaagcttcattttccttccatttttctacttgctcatatttttgccctttatgttattcactctttctggccaactgctagtaatccttcaaagctcagtgaaactgtcaccttttcatacagtattccttactctcagccactcatatttaattgcttgggtatttgagcaatatataatgtgttgtcaaaagtgtatatttatgtacacgaaaagttaccactctaaaagaacttaataaactagtgaaaatttgtttttgtaatatttagaaggtttgctaatagcatgttttccaagtttaatgtgctgtgattaaatattttgtttctgttcctgtgaagggatttaccaattggaataagagagattttaaccagtttatcaaagctaatgagaagtggggtcgtgatgatattgaaaatatagcaagagaagtagaaggcaaaactccagaagaagtcattgaatattcaggtaattcttttaagcaggctgttggagtttagtaagagctgttggaaggttcttgttttcttattctgaattatgttgtgattagctaattttgtcacagtgtagttagtaccttcttcattattttttacaaattagaaaatgttctgtttccagaaatggcgtaatggtttcctttttaaaaattttttaaccctagctaactctagcgacagcaaagaaaatcagaataagtcactggataattgcccttgcatttttatcttaatttctctgcataacttcaagtattatgtgttgtgtttcctgaagtcagttgtattattaggttaacatgtgagggtatgctgtggtgagtctgcttagaatagcagaaatttaagaattagaagataaataatccagttgatcccattttttttacattaaagaaataaaaatataaatgatttgtttactttgtccaacttttacagctgtgttttgggaaaggtgcaacgagctccaggacatagagaagattatggctcagattgaaaggggagaggcgagaattcaaagaagaataagcatcaagaaagcacttgacacaaaggtaatttgcttgttaataagttaggtagttaataaaataactcctagctgtgagtatgagagagtgactttttataaaggaaaagaagtaagggtttacaatttaaaatttcttcagagtagcattcaaacatggtattgtcagcagaatttacctatacactagactgatagatctgagtcaaagacactaagattagctttttactaagtagaatcaggaagtcttagtctgtatttctctttataataataaagactataaaggtctttcgggacaaagattatataaagcaattgaagtgctctagatagaaaattctgatttgaaatgcaacattttagctaattatactaaagctgagtttgaaatacagattatataggatttgtattttatataatataaaatctgactttcatagattggacggtacaaagcaccttttcatcagctgagaatatcatatggtactaacaaaggaaaaaactatactgaagaagaagatcgttttctgatttgtatgcttcacaaacttggatttgacaaagaaaatgtttatgatgaattgcgacagtgtattcgcaactctcctcagttcagatttgactggtttcttaagtccagaactgcaatggtgagtgctcagggcttttttgtgtaatgtagcagagttcagagtaagtgtcatctttggtattctttaaggtgactttaaaaaaatctatgaagtagacttttgttacaatattgttagtatcataaaacctaataccagggatagcttacaagtttattggtcctatcctttagtatcttacgtctttaaatatcactatatgataagactagcttttcaagttctaagtgggaggaagtatcagtttcaacttctgagtgttacgactttttggtttttcaaatgaacatatttctataaagaaaaatggtccttgcattcaagcatctgcacatcagaatcagcattctgatttatttaatataaatcatccagagtctggattattttaagatggcttattatagtgaaacactacttttgcactgatttagtgctaggttttgtttttattcccaatatctgactaacagtttctgaccaaatagccccatttctaataacctaaaatttgaattcagaaaagtttaactttgatggattgctccttttcttccttatttcaccaccattgaactttgagcttcaacttgttttctgccagatgaggataatgctaataagttctttagtcttaagtttgggatattctgggataagcaaagtttaaacatctttgtgtttgtttatagtaagatttctctgtatatttaaagtaaaatgtcactttgtaagacagtggatagtaagcagtattttcatgtttgaccactgaaaattttttttcactagacatcactgtttgtgatacccaagtttgggaaatgtactaaacttaaatacatgaagatactttgaagataaaacactgtataaatatataattagagaaaagatccagttgctgaaagcttatttcttcttaagtgggaacaatttatagagttaataaagaataattttatagtgattgtaacaagacagtgccatgttaatttaactagtacagtaccgtaatttaaaactgtgttacttcttaacatgttccatgttaagatgcacaaaaaatgataatgtattcttctatctctatatactatttctaagtcttgtgtggtgtattctatacagtagtattttaaaattattttactgtagttgtgtgtgtagtagtatcacttactataagaaaaaaataattttgctctataagaaagggggctgctacccagcagccgtccgtgcagatggacttctgtttctttcagggttaactgctacttctatgttatactttaaatcttttctggaggctgtatgtccagtttgccagagagagatgaggtagaactcatcgtagacttccatggctggttttccaaaattgggaaaggtgccatgtgattgattgactaccataattctagtgatactttgaagggaaagattatacacacctgttaaagttcttgttgtttttgaccctcacatatgtgcactattaatctttttaagttttggatataagtagcacagtagttctcagacatacacactaagtagcagtattgcatatgttcatttttattgctttaattcctaagtgaaggaagaatttttgaagaatacacagtagtttggctttaaagattggagtaaaaacattatttacaaatatcttgcctttaatcttcatagcatgaattgtatatgaaaatcagttgttttttttttaaatcaggggtgtattagtggttttatatattatcctattaaaacataccttgttttaaaattgaaatcatgaaacttgtggatggaaagtgcgtgtaccatgtttgtttataatttaggagctccagaggagatgtaataccttaattactttgattgaaagagaaaacatggaactagaagaaaaggagaaggcagagaaaaagaaacgaggaccaaagccttcagtaagtattcatgaatatgtaaatatgtggattatgtaaatttcccctttctaagtatttaacactgcttggctgtcattgatgtgttagtccctgttgtgcacccctccattgcctttacttttttttttttttttttttccttaagggagaacccaagctcataatttgagattcttccactttcaaatttaggtagtggtataatttttaatttttagttgttatgagtaagtatgtatttataggttacatgagatactttgatacaggcatgcaataagtaataaggacatcagggtaaatggggtatttatcacctccagcatttatccctgttacaaacagtttaactcttagttattttaaaatgtataattaaattatttattgcggtagtcactgtgttgggctatcaaatactgggtcttagtctctctttgtatttatttgtatccattagccagccccactttcccccacccccactgcctttctcagcctctggtatccatccttctctctgtctccatgagtttaattgtagtttttagctcccacaaataagtgagaacatgccaagtttgtctttctgtgtctggcttatttcacttaataaactccagttccatccatgttgctgcaaattacagggtctcattgcttatggttgaatagtattctattgtgtatacataccatgttttctttatccatttatctgttgatggacacttaggttgcttccaaatcatggctactgtgaatagtgctgcagtaaacatgggagtgcacatatctctttgatatactgactttcttttgggtgtaaacctaggagtagggtaactcttatctgtagttttttgaggaaccttcaaactgcttccacagtgattgtactaatttgcgttcccaccaaaagtgtatgagggtttccttttctccacattcttgtcaggatttgttattgcctgacttttggataaaagccattttatctgggatgagatgttatctcattgtagttttgattgcatttctctgatgatcagtgatactgaacagcttttaatatgcttgtttgccatttgtatgtcttcctttgagaatcatctgttcagatcttttgcctatttttaaatcggactgttaggatttttttcagtagagttgtttgagctcttacatattctggttatttattaatcctttgacaaatgggtagtttgcaaatattttcttccattctgtgggatgtctcttcactttgctgtttcctctgctgtgcagaagctttttaacttaatgtgatcccatttgtccatttttgctttggttgcctgtggggtattattcaagaaatctttgcccagtccagtgttctggagagttttcccaatgttttcttgtagtttcacagtttgaggacttaaagtctttaatacattttgatttgatttttttatatagttagggatacaggtcaagtttcattcttctgtgtatggatatccaattttcccattaccatttattgaagagactgtcctttctccagtgtatgttcttggtagctttgtcaaaaatgagttccatgtagatgtatggactttacggacttatctctgggttctctgttcttttccactgttgcactgatctatgtatctgtttctataccagcaccatgctgttttggttactatagctcggtactataagttaagtcaggtaatgtgattcttccagttttattctttttgcttagggtggctttggctatttctgggtgttctgtgggtccatataaattttagtatttttttttctatttcagtgaagaatgtcatgggtattttgataaggattgcattgaatctgtggattgctttgggtagtatggacattttaacaatattgaatttgctaatccatgaacatggaatatctatttttttgtgtcttcagtttcttacatcagtgttttatagtttatcttagagatctttcgcttctttgattaattcctgggtattttatttcacgtgtaattactgtaaatgggattactttttatttttcacattcttcactgttggcatagaaatgctactgtttgttgtatgttgattttgtatcctgcagtgtcactgaatttgtttatgagttctaatagttttttgatggagtctttaggtttttccaaatgtaagattatgtcatttacaaatagggcaatttgacttctttgtttccgatttagatgtcctttctttctttctctcgtctgattgctgtagctaggacttccttgaaatacttaaaaagtacaaatttagcttgactgggttgtgtgggaaaaatcacttcttgatgatatggtagtccttaatatggggcttcgtgaaaatcaggaaagtatgtctcgtaaatgtcaagtgtgtacacatctcattgagaatacaagttataattttagaataatttaagaaacattggaaaagcagtggtattatgacttttactgttagtctctaagctttgattatttcagtgatgttttagcaatgtgaaggcaaacacttaaagggaaaaaatgttatttaataatagttaatttaataaaaaatggttaatttataaagtcatgaataaatgagtatctctggataatatttggtacttatgtaactgccttttaaaaactcaagtgtttcttactattttgggaagcttgcatttatttgatattgatctactactgttaattgtgcattagttttataacgtcattattaacattaacattttttattctgtaagtaaaataagtaggtaagattatttggaggctttatagtttgctttgaaagatttatatagcctgggggaaaagtctcatacctattactttgtagtagttgttattactaaagtgttataatgtgtctgcaactatatttcatgtttatattagtcttgtgaaaagtaatccttctgtctgtttgtagacacagaaacgtaaaatggatggcgcacctgatggtcgaggaagaaaaaagaagctgaaactatgaatatgtttttgtttcataatcactaactttaaaccagtagttctttaatttacgggtcttcataagatgtactgtacaatgctcaattgttatgtcatttaaagacatcaggttcatctgtttactgagctagaaacatagtatgtagtttcacttttttaaatgcaacagctgtgctgaaatttttttatcattaacacttgaagtaataaaataggcttcatttattactaagtgtttcatttgatttatttttctattgtagttccatttgtgaagattgtgactttttgtttattagctataatttctacacttgtaaggcttaaaaacaagttaaaaagaaaattgcaaataacatttgtccctttcagtcttcacctagttgtgtaattattttaattcactttgcctttgcagaaatttgggtattttctttgtagtgctattgagtctcatctggaaagattatataaattgcattctccttgcttatgtgggtagaatgggaaaagaaggcaagacaaagtatacttaaattctatgcatatttctgttatgctttctgttttttttagttgattctgaaatgaatatgccctattcttttgaaagaatggccttttagttgtatagccaaagacatttagtattttccggttccttaaggtattactgtaccattttgtaaaaggaatattattattattatttttaattatttggtaaatattttgtcatatgaccttctgaagcagccacaacttagataatgtcagaactaaggtgattttttttttttaattttgaaagcccagccaaaatgaggtgtgaatttgtcatactgttacattgaaattggtaacaaaatatatcccctcccatttggacttttagggtaaatgaaaattttattgtattttaaagtagtttctaagtgttagcaagactgactataattccagtttctgttttctatggacagacctgataaactggagaccctaaagcaggaatacccaaattatagtgtcaggattttagctgtaccagaggcctttatgtgctacacataatttgtataaaattttatatgtgcagattgggtacataaacagttctccatttttctaagggaatgcaataaatgtagcatcgtgaataaatataacttttataatccgtaaagtggtcttttctttccatttctttaattgttttctcaatttttattcactttttcctttaggacacatttcccttaattggatatctttcccttaaatttctattagtagttgttttcatctgcccacatgtaattgaagatttaaaaaaaaaattttgatacctgcagtattactaatactgcttaatttcttgaaatgtggaattgctgctgttaatgtcaagcaaaacgcagtatttatggcaaattgtaaagtaatttgaatttagtgctacctcaaaattaactttttaaatactatgttagattcttaacagttaaaggtctaatacatgcatgaggaatggttacttatgaaaggaaaaagaatttgtaagagttatcacctcagtttggaagaaattgaaaaaatgtaaggctgaagaaaacttacggaggtcacaaaagtgatgttttcaagaggaggagaaactgggagggagatacacagtggaaatgcaaaatgaatcaagtatagtggtagccctgagagcttagggactcaaatggaaactgtgtgaagggaaactcacttgaaaaaaaagcatgaaccagctaggccctgccaccactgtgtttggccaagttcacaaatctgttttaacctgtcacttccctgtcacttctctggctttcctctcccgctaagcttttgtttcctggcagtaattaaaatcttctgtcagtgccacagctactactgctactggaactgccttaaccactactgctactggaactgccttagccaccttggtatcgtggtttggcaaagtattggcctctaccaccatagggcccagagcttctgcctccaaagtttcctcccttcatgggtccaaaatttgaagactgattgttgtcattgccaaaatcattgtagcttttaccacctccaaaattgcttcaatcattaccaaatctattatagcaatccccactgccaccatatccatcaccaccaccatggctgccaccaaagccaccacgatcacagaacttgatgactgtatttgtgactaattgtataatagtttctgttctgtggaaagtaaagcattccaacacagggtttcagtgtagattgttttgttttgtacccatgctgttgattgctaaatgttttaataatctgatcatgatactgaataaatgtctttttttttttttaacaacaaagcatgaaagattgcttaattgtacatctgacaaagtgctggaggctattataaagtgtaattattactacttttaagagacagggtcttgctctgtcacccaggctggagtgcagtggtgcaatcacagctcactgcaacctcaaacttcagggctcaagtgatcctcccacctcagcttcccaagtagctaggactacagataccacgcccagctaagtttttttagtttttgtagagatagggccttgctatgttgcccagtccggtctcaaacgccgacttcaggcaatcctcttgcgtcaacctctcaaagtgctgggattacatgtgtaagcctacattccaaagtgctgggatcatagttgtgagcctacaccacacctggcctacattttgtttttcataaagttgagagaagcaaatcctaagcatagagtacaagttgagcatccctaatcaaaaaatctaaaatcagaaatgctccataatttgaatgctcattagggcatttctgatttttggattagggatgctgaactgataagtataatgcaagtattctaaagtctggaaaatgctaaaaacacttctggttccaggcatttcagataaggattgctccatctgccctttgagtatttaatatatgccgattgtttgaactaatctggatttaattatataaatgattatataaatgatctttggcttagtacctttcttaatctcgatcttaaaaagcattgtaaaacacccctgtggtttttcagaaaaattctgagtaaaaaataaatttcatcttgttctatccctttgaatctaaaaaacaaatctttttgaaaggatgtgctactatatttcaaaccagtagttttggagtagaacattgctaaaaaaatgggtactaaggagggtaatttaaacaaagtagattaatgacacaaggtggattgatgaactcataaatccaaatgaatggaatgctagaagacatgtattaacggagtagctgttaccaaaatatatacatattttgtatatgtacatagctgttaccaaaatgtatctttgcctgttggaatctgatgtcaagatcaaaggtgagggcatccctcagatgacagataatgggcaaaatacattcttggtgtggagcagtgctgcagaattaacttcgctgtgtacatcccagaatcgttttggatctgttaaggtttttattagaatgattaaataggcttttgcagcattaactttacagtagttaccagaaaagactatgctacaagaaccaaaattgaagtaagaagaaaaagactgaaatgatatgattctaaatgaaaaaaatgaagaagtggaatagtttctccacaggcataagaggcaaagcattgtttcagaagtggactggcacctcacctgagatactcaagactggcaacatgggtctacattctttgttaccacagattcccttgtgtccggagagattccctagctctaatgacagcttttttggggggtaatgaggctatgagaagattgaggatctaggtacttgcctttaactctacagcatacaaggtgtgtggctcttatctctaggacaccaatatttaatgttgcatatcatgtatctccagtacaagaagaaagtttatcagaatttagttaatgttggaaactttgtaatataaacaatgtaaacactacattgacaaaaatattttattaatacaaagaatatgcatatagtttgcttactacagaaattcttgtttttgatgtagacaacccaaaggagtttttatgtatatagattgtgaataaattgggaaaagaaatagagataagtagagattatttcacttcattaaacttttgaagtcctaatttagttcatgtgattatttgtaaacttttctttattagtcttcctcaatcattgaagaacccaggattcaaatacaatacttaatggaaacactttttcatcccaaactaaatcctgccctgaaagccgaattcactatgaaatctgagatgaaactccaaggctattatgctggccagtggaaggttggttcacccctcttgaggtgacattagggtggtctgcagacatcactggagtggacaaagagatgcctgggtggttggggaaaggacagatcatagacaacagtagcctctttctagagctcagttgcaataaataccacagttactcatcagacacattggcagttctacttattcccatgtttcaaaactagagaattctagcaaggactaagcactgcttctgtagaccatcggtatttctccatggctgtttgaatttttgtcaaagcttctgtgtctcatgcacactagtgacttttgagacagagtcttgctctgtcacccaggttggagtgcagtggtgcgatctaggctcactgcaacctctgccacccaggttcaagcaattctcctggctcagccttccggatagctgggactacaggcatgcaccacacctggctaattactgtatttttagtagagacagggtttcaccatattggccaggctggtctcgaactcctggcctcaaatgatctgcctgcctccgcctcccaaatgttgagattacaggtgtgagccactgcatctggcctgatgcagattgataatttcttgagtgaggcagtgctgttgcctagtagcaaggcttagctgggtgagacattactagctgccttcagaagcggatctctgccctgaagtttaccagcctgctttccttgatgcccatgctggctgggtgtagggatcctgagtggagggaaaaagaagaatagatgatacagatttgctgtgcaaaggcggagttcttactggctcttcctcacaaacaggctggtgattagctgactttcagattcccttctgggaggtggcaaggggccatctggtcatcctagctttgcaaggagtaacttttttttttttcattttatatgccctttaatcccagtagatggataggtttgctttcttagtatgctttccagttgtagaaaggtcttttctctgggtattggctttcccccagcctcctattttttgcgctccccctcctccccagccacctctttccctgggagccaacttgataaaagtaatggcacaagtcttgcagaatactcctaccaatctaaatgctgcagacgccacagtgcttttttctcacccttaatagtcgtaagataagttagagggagctccttcaagagtacgctgagtttagtttcttcacagcaggaactaatctttaaaaaaaattatcattgggctccttattgtaactggacagtactggaactgggtgggtgcttgataagagaatgaatagtttaggtagttacaatgaaaccacaggcacctgtagaggtctccccaggctcaccttgacgctctgattggcggctgcagaccccatccgcgagatggcagtgttaggaacaaaggtgagctgcccactgcaggtcaaacgctgccggctaccagctgcagctgggagtgaaagactagaatacagaaaggcgcaggcagtcacgtaggactaggccgggtttaacacccgaacagtggtgctagaaggtcagagtcttctacgtacatgttggaaacatccttgattgtctagcaccaagacttttaaacacagggggacaaatcatcactttgggtatttgtaattgttcgtcagttcaaatctcttggttttaaaaaaatactttccctctgcgcgactggcgcgtcacgtcgcgcgcgaccagtccgcagggctcctcccgcgctgctgataggcccgcagacggcggcccagcagaggagcggaaagcatggtccggggggcggcggacgcctggtaggcgctcgggccgttgttgtggggctgcgcgctggcgctgcagggcgggatgctgtacccaagagagaggccgtcgcgggagcggaagaagctggaccgcctctggagcttccgcgccgacttcttcgacaaactgtgccttggcttctaggagtagtggtatcggcgtctgctgcgagagtcgggctccaccatggacataccggttccctccagcttcaacgacgttggccaggactggcggctgcggcattttgtagaccagatgtggtacgaacgggaggtgaccttcctggagcaatggacccaggacctgcacacaagagtggtactgaggattgtcagtgcccactcctatgccatcgtgtgggtgaatggggtcgacgcgctagagcatgagggatctacctcccctttgacaccgacatcagtagcctgttccaggtggggcccctgccctcccgcctccgcatcactatcaccatcggcaacatgctcatctcctccaccctgccaccagggagcatcctcgacatggccgacacctccacgtgggtaccatcctgcttccaccgcagacacccaccttcctgtcccaccccgtggggcattacattagggtaattacattaggtaagtcacatatcagtgacttacaaattttgtaagtaattaagaaattttcaataagtgtggagctgaatatttacatgagcccttcaaaaactgatagttaatggaataaatgaaaataacaggagagactttgttgaaagaagacaaaatagtcaaggaagtgatagaggatacaaaagaaagatgaaaacttacattcatttaatgtctaaccgtgtgccaaaagacaatattattatttagttttcataaccacaacatttggtggatatgattgcttccattatataggttaggaaagtaaagcttaggggtttgtgaacccactagtttaaagttgtgtagccaataggtggttgagtgagaattcaaaactggaacagatttgcttgatccagaatggtataactttattgtccatgcattgtcttctacattttactgcctgtaaagtgggagtcagttatgggaggagacccagaatgtcacaggttttgaaagctgctgtggaaaatttggaaggaggcattggatttaatgactgatacaggtcagtgcagattgaccttggagagaacagttttcttcagtggcatggtagtgttcaaaacaggatctgatggtaaagaaaatgtagaaccagtgtgtgtagactccttgatggaaaagtttatttgtaaaatatcagaggaaaattataatatagatttgtccattcaaaccccaaagtccagattcttactgcaatatttgatgtagccaatatacagcagttgagttcaattttggcccctgtttatgtgtatgctaaagaaaaataacaatcctaagcctatgccacttaaacaagaggatgtgattatactatgaaacacttgtgaccataggaatatagcagtgctaaggcaaaataggtcttaacttgacttttcctgtcatttgctgccattgtttgccaaaggtctagcacctatcttcagaggaaagtcaagaaattagtgctcagatggtgggatgaattcctgaattattgttggctctagtagtttcttcagatcaattttatagtttctttagaactagaaaattaggtctcagaatggcagttggccacccaatgtgtataatacaattactcaaccagctgcttgaaagcaaggggcaacagagaagtcagctactggctcaggcaacaggaaatttgatgatactccttggtcaaatccttcatttaacatacatttatatagaacctttctgtatcaggcaccattctaggtaccacagataaaacaataaagagaactgacaaaacctcagccttcatggagtttatatgctaacacatatgcataaacaaacacatataaaaatccagaaagtcgttactgctgtgaagacaaacaacacagagtaagcagatactgatgttgggttgttgccttaaggtggtcagcaaagttgtttccggggaaatgacatttggatgaaaaactgaataatgtaagagagttaaccatcaaacatctgtgtgaagatctttaggaggagtgggggaaccgcaagtgcaaaagccctgtgatgggaaagtgcttgttatgtttgaagaacagcagtaagacaccatggctggagtgtagtgggggagggagagagaggtggtaaataataatggagacttagttagggccacatcatgtaaatagagcttttacagtcttgtagacaagaaatatgttttgatttttccctaagtccacaaaatagtttgtgatagaaagccatcgaaagattgaaaacaggggagtattatttgtaacctcagttgctgttccatgcaggcataggaaagaataatgcttccttgctccatatctattgctgaaacagttctccatgatctctttagtctgaggacaaatgacatttttctggttacaagacagaggggatatgccatcctaggcattgagattgggaaatatcaagcatgcatgtgactgccaagtattaaaccccattttctgatgaccactagggttccaggtatcagcccataaagtgagctttttctgagaagaacgaaagatggcaggtagaaatgattgagctggtaaagaagactgaggcttattgttaaggtctggggcctaaaaatgtcagggttcaaagtgatcaatttggaaaataaagagatttggaccctcctctgaaatcagggagtagtgaatatgtggagtcagaaagtaactgcaaattctggagaaactgtggaagcagcattttgtaggagggtgggggaaacaacaccctcaactagtatttctaccttctggtaaatctattactttaactttacctctgccagtcaataaaactttttcatgttttggtacatttaaaaaatacttttcctctttctattacttaaatttcacattagaggttgatgtgggcacccaatgacagcgtgtacgggcacatttttctactgtgtggttaactctgcttggtatctgacttgttaacagatcttcttgctggatacatatctctaggaacagaattaatcttttttccattttagaggccagaaaacccatgaagaaaggtaataagaaatttgattcctggttatattataaattattgaaggtaattcttcaaggcagcctctcccttcacaagcccagaggtctaggaggaaagaatgattttgggaaccaagcctggggccccccattaccctgtacagagtcaggacactgttccccgaatcctagctgctttggctccagcctcagctcagagggccccagatactgcttgggcaactgctctagagggcacaagccataagccttgtaggtttccacatggtgttagttctgcaggcaggcagaaggcaagagtggtggagccttggcaactttcctctagattgcagaggatatagtggaaagactgggtgcccaggaaaaagcctgctgcaggagtggaggccctgtagaaagtctcgatagggcagtgctgaggtgaaatatgagattgaagccccccatggagagtcctcaccgaggcactgcctagtggagctgtaggaacaggccactgccttccagatcccagagtggaagagccagcttataccttcagccttgaaaagccacaggcattcgactccaacccatgagggcagccatgtgagctgcacccagcagagtcataggggtctgactgtccaagaccttgggagcacacccctcgtaccagtgtggcctggatgtgggacatggagtcatgggagattattttggagctttaagatttaatgtctgccctactgggttgcagatttctgtggggcctgttgccccttatttttggcctatttctccattttgaagtggaaatgtttatcagtctttatttcatcattgtatcttggaagaacataacttgttttctttttttttttgatttttcaaggtaatattctcaatattatttattatttattgatagcacatgacttcaagagagttaacacatttgagtttaaaaaatgatttgcttgtaagtaaaaaatagaatgtaacatacagaatagaaatctatatagagaaaatcatatacagtaaagataattgaattagtttaaaaaggcacataatgaataacaagtactactttttaaaagaatgtttatgcttttggttaaatatagtgaatgtatttttattacttttccagaattatgaataaataattataccccatcatatttatcattttctaaaattatgttttatattctaaaataatttttatgtcaggcaattctgtctttctatacctttctatacaattctgtctttctataaatattcttccaggctgtatttcactttgtgccttgtgttttcacctaaatgttgagggaagaaaattattttttggcaaataaccattttcctccaggtttttaatctaaaggtggttatatgctaaagacaatatgatattaagaaagcagaatgtgtcatgttcttactcaaatgctaaaccttttcttaatggaaagaaaatatataaactaaatatgttgtttctgagacctgaagattataactttttaaatgtatttcagtctaaaaggttaggatcccatgtataaacatggcagtgcataagacacaactgagaggcgaactgctatactatacagaattgttagcatttcttgtggctcgtgtatgtttcagaaaaagatcagtaagttaccacacttttcttgcaaaattgtatataaattaacctgatatccttttataccaaatcgtggttactaaatattgctattctgtaaaagtgcctaagaatcattattttcaacactaacaccccggaaacagtaagagaaacctgaaagtggtaggaaagaatgaaaggccttattagtcatctaaattataagttttcttttatgttgttaatatggacatggtaattataactcagtatcttcttggggtccctgactcattgttcttcactcactcttattaggacctctggaagatataatttatcctatttaagtgagcaggattttcccctctagacatactttataagcattttctcattagaaaaccacatgtgctataacagtagtttgatttgctctttacaatatcaacagatactacttgtttctgtttgttttttgtttttgtagagacagggtttcatcatggtgatcaggcttgtctcgaactcctgacctcgtgatccacccaccttggcctcccacagtgctgggattacaggtgtgagccaccatgctcagcctgtttttttttttttttatttcaatagttttggaggaacaggtgctggttggttggatgaaaaagttctttggtgatgatttctgagatttttgtgcacctgtcacccaagcagtgtacactgtacccaatgtgtactcttttatccctcaccacccccgcaacccttcccccaagtccccagagtccattatgtcactcttatatatgcctttgcatcctcgtagcttagctctcatttacaacatacgaacatacgatgtttgtttttccattcctgagttacttcacttagaattatggtctctttccaggttgctgtgaatgccattatttcattcctttttatggctgagtagcattccatggtatctatataccacattttctttatccactcattggttgatgggcatttaggctagttccatatttttgcagttgtgaattgtgctgctataaacatgcatgtgcaagtgtctttttcatataatgatttcttttcctctaagtagatacccaagactgggattgctggatcaaacagcagttctacttttcaccacatccacaccaacatctgttattttttgattttttaattatggccattcttgtgggagtaaggtggtatcgcattgtggttttgatttgcatttgcctgatcattagtgatgctgaacaatttttccgatgttggccatttgcatgtcttcttttgagaattgtctattcatatccttagtccactctttgataggagtatttgtcttttttcccttggggctgtctgtttactctgctatttcttttgctgtgcagaagttttttagtttaattaggtcctgcctatttatctttctatttgttgcatttgcttttgggatcttggcttaagccaatgtctagaagagtttttcgatgtattttctagaatttttatgatttcaggtcttagatttaagttcttttttttttcttgagatggagtctcgctctgtcacccaggctggagtgcagtggcgcgatctctgctcgctgcaagctccacctcccagattcatgccattctcctgcctcagcctccctagtagctgggactacaggcacctgccaccatgcccagctaattttttggattttttagtagagacggggtttcactgtgttagccaggatggtctcgatctcctgacctcgtgatccgcctgccttggcctcccaaagtgctgggattacaggcgtgagacaccacagctggccagatttaagttcttgatcaatcttgagttaatttttgcataaggtgagagataaggatccagtttcattctcctacttgtggcttgctaattatcctagcaccatttgttgaatagggtgtcctttccccactttatgtttttgtttgctttgtcgaagatcagttggctgtaagtatttggctttatttctgggttctctattccattccactggtctatgagcctatttttataccactaccatgctgttttggtaactatagccttgtactatagtttgaaatcaggtaatgtgatacctccagatctgttctttttgcttagtcttgctttggctatgtgggctcttttttggttccatatgaattttaggattgttttttgtagttctgtgaagaatgatgatggtatttctatgggaattgcattgaatttgtaaattgctttcggcagtatggttattttcacaatattgattcttcaaatccatgagcatggaatgtgtttccatttgtttgtatcatccacaatttcttttagcagtgttttgtagtttttcctcgtagagatctttcatctccttggtaggtatattcctaagtattttattttattttttttgtggctgttgtaaagggggttgagttcttgatttgattctcagcttggtcattgttggtgtatagcagtggtactgatttgtgtgtattgattttctatcctgaaactttactgaattcattgatcagatctaggaggtttctgcatgagtctttaggattttttaagtatatgatcatatcattggtgaacagtgacagcttgacttcctctttaccaatttggatgccctttatttatttctcttgtctgattcctctggctagacttacagtactatgttgaatagaaatggtgaaagtaggcatctttgtcttgttccagttctcaggcggaatgatttcaacttttcccctttcagtataatgttggctatgggtttataatagatggcttttattaccttgagctatgtccctttcatgccgattttgctgagggttttgatcataaagggatgctgggttttgtcaaatgctttttctgcatctgttgagatgatcacataatttttgtttttaattctcataacttgtttttgatcttacaggcttatagatggaaggaactttccttgagtctcagattggaccttttggacctttttttttttttttttttttttcttttgagttaagggtctcacttggtcacccaggctggagtgcagtggcatgatctcagctcattgaagcctctgcctcccaggttcaagtgattctcttgcctcagcctctcaagtagctgcaattacaggtgtgtgccaccacacctcactaatttttatatttttagtagagacagatttcaccatgttgcccaggctggtctcgaactcctgacctcaagtgatctgcccaccttggcttctcaaagtgctggaattacaggtgtgagccaccatgctcagtctcagattggacttttgagctgatgcttggaatgagttaaaattttgggggactattgggaagggatgattcttttttgcagtgtgagaagatcattagatttgggagggaaggggtagaatgatatagtttgggtatttgttccctccaaatctcatgtttaaatttggtccccagtgctgaaggcagggcttggctggaggtgtctgggttgtgaggtggatacctcaagaatggcttggtgcatttcttacagaatgaatgagttcttgttctgtttgttcacaggagaacttgttgtttaaaagagtgtggcaccttcatccccctttttcctttcttgccatgtgacacaccagctccccttcaccttctgccatgattgaaagcttcctgaagcctcaccagaaacagatgctggtgccatgcttcctgtacagcctgcagaattgtgagccaaataaacttttctttataaattacccagcctcaggtgttcctttatagcaacacaaatggactaagacagcagttttcaaagctttacacatttggctgtatgtcttttttctcttctacagctgtctaacctgcttcttatttgccccaaaggaggatatagggaaactttgggctcatgttaatgctcataggtagatgtcagcagtgatacttctggatcaggtgaggctatccatttgacttttacacttgagcccatcagacagctttactactgtattagtccattctcatgctactaatgaagacatacctgagaccgggtaatttatgaaggaaggggtttaatggactcacggttccacatgtctgggaaggcctgacaatcatggcggaaggctaatgaggagcaaattcatgtcttacatggcaacaggcaagagaatttgtgcaagggaactcccgtttataaaaccaccagatcttgtaagacttattcactaccatgagaatagttgggggaaactgcccccatgatttaattatctccacctggccccatccttgacacatgaggattattacaattcatggtgagatgttggtaaggacacagccaaaccgtatcattccacccgtggcccctcccaaatctcatgtcctcacatttcaaaaccaatcatgccttaccaacaatcccccaaagtcttaactgacttcagcattaactcaaaagtccacagtccaaagtaatcgcccttgaaacatggggattactacaattcaaggtgagatttgagtgggaacacagccaatccatatcaactaccaacattaaatcactttaaaaaaggtgccaagaaatctgatactttgctttacatttaaaagaagaggataagaagtctaaaaaggctttaggaaaaatctttcaaatcaccctccattattaggtggagtaagcactgggctagctagcagtcaggagaatagagtcatagtctcagccatatcacagccaatgtgatgctgggaaaaataatttgctgaaatggaacaggagctcatctttttttttttttttttttgagacagggtctcatccaggctgcctggagtacaatggcacaatcatagctcactgcagtcttgaactcccaggctcaagaaatactcttgctttagcctcccaagtagccaggaccacaggtgtgcaccaccacactcagctaatttttaaattttttttgtagagatagggttttgctttatagccctggctgttattgaactactggcttcaaactatccttctcccttggcttcccaaggtgctgggattacaagtgtgattcacaacactcagctaggatctcatcattttaaagcacttttgcttgtacatttcagttgaatcaactcaagcctcagtttcctcaggttccatgattctttgtataactctgtacttatcagctataagtataagcacatcaacaaatcacaggtacttcaattcatgcttttatggcaagatgtggaagaaatgtaaaattaggagtcaggtgatgtgggctcaaatcttagctccaccccttgatacctgaacaactcaggagtatttttatttctattatgggatattaataagcacctcacattggactaaggacaattaaatgggaaaaggatatgaaggcatcttgtaaattccaagtaaggaaactgttgaaagtgaatatgatagtatctaaagctccatttgaaatttcagatgtggagctgcctcttcaattagttgatttatctggcgttcattcacatttacactcacatttaggattgctctaagcctttaatggattattgtgtccccagttaatgagtatggattgctgctctgctccagctgtcccccaccatccatccccatcagtcctcctgtcagaagcatacctggccatcagtgcgaaggagccactggagcacactcagtcagcagtttgggcatgtcataatatctgctgaattcacaggggtaggcctccaggttgaggttctagtgaaagcaaagggtgccagcaggtcttagggaggcactgcactgtttgagggtggggggctctgcctgggcactgccaggtgcttggcgtgctttgtggtgaagccatccttggtgtggagcttgctgtcaccagaagattggagcactgcgtttgcccacatgggaggaatctcaaatatacttagtgtctgcccaagagaaggaagctcagtatacttagtgtctaccatggcctgccatcagggctgagagggagctcaaaattgtcaagaggccatgtggacatgacaggcagcattcctggaacccagggagacagcctgcatagggcagagcttggggttggggtgactgggtcctacttgtatcttcagttcttccagtggcctgaggcatggccctgaggtcccccttctccttgcagagaatgcatgcctgtgccttttgtcttgtggtaacacctatcattcatgtgcggtatcatcacaatgattttgattaaattgaggtaaacagcgtcatcaggccccatatattgaatcttggctgagaaaggctcagctcccactgtgtcagacagatgaggctgacagagacctgggagaacagatgctaatgaaaacataagggactggccactccaggataataagaataaaacaaggaatagtaattacagtttgctgagtgcctagtgaacactagtgtacatatatcatcatattgattctcaataatcctatgaaggagatattctcattttgcaggtgaaaaactgagtcattgacacaattacctctgtgaattattgacttctatattataagggaaacaggcttggaataaattgattaataataatcaattactgatttttgagatatcaatgtacttctctcaaaaaattccttgttcaaatgtggcctaatttcttgttgcttcaacaagatgaaaacatatggaactcttccttcaatggttgtgcttaggagactctctgatgggatttcttttagtccttggaagatgtaattgtggacgtaaaaaaatcataaacacacacacatgcatacaacacatatttagtgaaattatttcatacttgttaactattatgttaaaaaaatacatttttacttactcagaatggcctaagaaagaagtggaagctcaagtatacttagtgtctaccatggccagagagctggggagaactgaggcagggtctggacccagtgaaaaacattcattagggctaaaaatcattacacagagtttgcactgatctggtcctagctcaggcttcctcctcactgggagccccacctcactcagctctgaactgggccctttaagcatgctctctcaccagtggggtgttctatcttagaaaaagttgctgtcgacctcactcagtgacactaggagtgcattctgtaggggggatgtgcctatacctttgctttaacattctttgaataagtataagagttgcttaatttcaacattcttcctcagttaatatatttcttgtagcattatgtctatttaagttaagcacttctgttcaaaacagatacttttacaattcaagatacctcttaatatgcatattatatattatgtaatatattaaaatatacatgagatatatattgattctgacattgtaagagcaataaaaattattatccgtaagaaggcacttacagtcttacagtacttgggggacatcattacatttgatttttattatggcacaatacaatattgaggaccagagtgacccggaaagaactggagctttagaatgagacaaatccaatgtgataaaatggtcatggtgcttaatccagggaagtatatccatatgatttttattatattttattacatttaaaatatttaaaatgtacaaaattaatgggggtatggtagagaaggtaagctcttgtgatgattcataacttcctatcatatttttttcttgtgatgctccattgtagaatcaaagaacatagctttgtaaaaagtccaacatatttgtgctagctctgaattaaaattcatttgatctattgtagtgtcaagatatgccataatactgagaatggaggagtctgaggccctggtccatcaactgacagcatgaacttcacgtcaagaagtgagattggtgaataagtgaagacagaaggaaaattggagatacagctggatgtatgaaccctgctctgaaaacactctttaacggtataaggattcttattaacgaattttatttcttttttatctgatcattattttattttgatttatagaggaatatatagagggggatatctatagagacacacacgtttgtgtgtgtatatataaatatatatgtatgtgtat

SEQ ID NO: 237 - DNA, 2856 bp, Homo sapiens
ctcagagacttggctaggcgcggcgcgaggcgggcgctgcggcgccagcagccctgtggtggcgacgacgatggaccaggagccagtgggcggtgtggaacgaggagaagccgtcgcagcctcgggagctgcggccgccgcggcattcggggaatctgcagggcagatgagtaacgaaagaggctttgaaaatgtagaactgggagtcataggaaaaaagaagaaagtcccaaggagagtcatccactttgttagtggtgaaacaatggaagaatatagcacagatgaagacgaagttgatggcctggagaagaaagatgttttgcctactgttgatccgacaaaacttacctggggtccctacttatggttttacatgcttcgggctgctacatcaactctctcagtgtgtgacttccttggagagaagattgcatctgttttgggtatcagcaccccaaagtaccaatatgccattgatgaatattatcggatgaagaaggaggaagaagaagaagaagaagaaaacaggatgtctgaagaagcagaaaaacaatatcaacagaataaattgcagactgattccattgttcagacagatcaaccagagacagtgatatccagctcatttgtgaatgtcaattttgaaatggagggagacagtgaagtaattatggaaagcaagcaaaatccagtctctgtcccaccataaaatgaaatgactatcaagcttcaaactcttaagttttttttttttaatacaaaaactttcacattctttattcagtgggacttaatacaattatttatattttaaattattaaagtatctggaaagggaaaatgttttcttcatttttaggatctatctagcaaaagccagatctgaaattcagatatttgtactgtttttactgtgtatagaaattagtgctttggttttaaaatgatcttttaaaaaagttaaggacatcctagagccttaatagttaagaagagttaaattatcaagcctatttgtgtatttgctttttttgaaaaaggtaagttgctgattaagtctaattggaattgataattccatagtcttagattaaaatgaggatattttctcctagattttctcatgttatgccatgcatttatatatctaaccattaatttcacactaaggatgcttcaccatataataaaaggagcaagatggaagcactttgaattttctttcattgagaataactgttttatgtaagaatctgtatttataacaccagatattaagataggcttccattttttaatgcaagccacttacttaatcttgtattctttttcaggactcaaataactagctttgaacataatattaaaacactacttatagaatagatttattaatgttaatacctagtgaatatccatgtggcatcctggttatcggttcagcgttaatcctatagaaaagtggtttggaggggattgggggatagtgggacaggtatagatttaatccatcaggagcaattagatattgtataaggtgcaatgatagcctaatgaaattacccgtcattcatcatttagaagtagcaacagtgaagactggacagtttacttgaatctggttggccactcctctacctacttggttatttgtaaaccttacaaatgtatatattgtgaagctaattttgaaaatattcctaaatatggccaggtacggtgctcacacctgtaatcccagcactttgggaggctgaagtgggcagattacttgaggtcaggagtttgagaccagcctggccaacgtagtgaaaccccgtctctacaaaaatacaaaaattagccaggcgtggtggtgcacgtctgtaatcccagctgctcgggaggctgaggcaggagaatcacttgaaccagggaggtggaggttgcagtgagccaagattgcaccactgcactccagcctgggcgacagagtgagactccatcttggggggaaaaaagtatatatatatacacacacacagacacacacacacacacatatatctctaaatgtgtgtatagaaccttttatcagtataacattgatttataattaaatgtgggtgaggaagaatgtgtggagtgtttcagaaattttgatcttaaaagccttttcagaaactcaaagctttcagaaattaatagttatattaatagccttctaaacagcattaagttttcaattttaatatatctatataaaatatagtgtcaaagaaagtaacatcaatatagtgggtctgtaatggaaatctgtcaatgaacatgaactgagttcttcaactacaggttgaaggataattaaacttttcattaggagtgttcagctacatggattcatggaatggtggttcatagtaagtgatggtaatctttttattcatgggtgtaaaccctttataacttagtgcttaaaatattaatcttttgattatataatgtcccatgaattatagtttaccaatagttctaaaacatgctaacctgaccttttccttctaatttgtttttaacttcattcgagatagtacctctcactcacagatatttatttggttatcaagtgaagataggtgtgtctaaaagtgatcttctgaatcctgtctccctagaggtactagtatctagagtttacccagaaaattttatgattgtaacaaaaggaagtagtgacttatgaaggttttgtttcttgaattttacttttgctacttgtccaatagtggctagtttatgtttatcaatatagttattcactgtgccttaagtttatactttgtttatgcaaactataaaatttcccataaatgt

SEQ ID NO: 238 - DNA, 31737 bp, Homo sapiens
gaattctttctagcctgtggtcagagttggttttgttcacatacgtagtttattatgttgggtttcaggaatgtgccagtgactctgcaaggtgctggggatgtaactgtgaacagaagagtcccctgatctcatggagctgttaaaaatgtcatttggcagagcagggtggctcatgtctataatgacaacactttggtaggctgaggtgggagaatcacttgagcacaggagattgagaccagcctcggcaacatagcaagaccccatctcttttaaaaaaaaggtaatttatgaagagcatgcaataacgtgagaattttacctattaaaaaataattcaatcataccataaggagttcttcaagtccctgagatcagctgcaaaaaaaagctaaaagtctctagtacatggctgccttccctaagctgttgccaaagaatgtgagatatctaagtgtttatatacctataaacctagcacaagtgttttcttttcattaattatacacgggtagttggttctacttaataactgaacagtattcagctttaaaaaataaacattaacagatatttcaaagaaatcccaccatgtttggctctatttttaagtggctttaaattatttgttgcttcatctcatttcaatgttttgagctcctatttctgttacaaatttcttctaggcaaatgtgaatgtaattaacacactaatatcatgttttaaaaacaaatccaggctgggtgcggtagctcacgcctgtaatctcagcactttgggaggccaaggcaggaggatcacttgaggttgggagttcaagaccagcctggccaacatcgcgaaacccagtctctactaaaaatacaaaaattacccaggtatggtggtgggtgcctgtagtcccagctactctggaggctaaggcaggagaatcacttgaacccggaaggcagaggttgcagtgagctaagatcgcactactgcactccagcccgggtgacagagtgagactccatcaaaaaaataaaaaacaatggacatcatggtctggtctaacgtggtttttttttttttttttttttacctccccaatacaacactcttcttttttttttttttttgagacagagtttcactctgtcgcccaggctggagtgcagcggtgcgatctcggctcactgcaagctctgcctcctgggttcatgccattctcctgcctcagcctcccaagtagctgggactacaggcacctgccaccacgcctggctaattttttaatatttttagtagagacagagtttcactgtgttagccaggatggtctcgatctcctgaccttgtgatccacccacctcggcctcccaaagtgctgggattacaggcctgagccactgggcccggctaatactcttcccttttgtttaaaaaaaaaagtgtgtttaaagtgtgtgtgtgtgtgtatgtgtatatatatatcatacaatttgccatgttaatcatttttaagtgaatagttctgttgcattaagtacaatactattattatttccatttaccgatgaggaaactaacatagcagtgaagtgacttcacccctactagtaagacagaaaccctgtgacaggcatgcaggcagccagctctagcgtctcaggctgtagagcctacaaacctccctcttccttgcaataaaagacttggtgtgaccaatagtgctgtaaatttttagtttactcatttgggtatttatttatttatttatttatttatttatttagagacagtctcactctgtcacccaggctggagtgcactggtgcgtgatctcagctcactatgctgcccaggctggtctcgaactcctgacctcaagtcacccgcccatctctgcctcccaaagtgctgagattgcagacatgagccaccatgtccagccaagatagtctacttttaagtacagttgcttatcacataaaaaataagaatatagtgtagctaaattgtacaaggagaatttctacaaactgtaaattcttgttccctgaaaacctgaagtggggactttattttaagcaagcaagaatcatcttttgctagctagaaacagtaaaataatatatcaaaaaagatgattagggctgggcacagagactcacgcctgtaatcccagcactttgggaagccgaggcaagtggatcgcctgagctcataagttcaagaccagcttgggcaatatggtgaaaccctgtctctaccaaaaatacaaaaaaattagccgggcatggtggcctgcatctgtggtcccagctactcaggaggccgaggtgggaggatcgcttgagtctgggaggcagaggttgcagtcagccaagactgcgtcaaggcactccactcccgcctggatgagagttagacttccaggagacggaggttgcagtgagccgagatcgcgccactgcactccagcctagcgacacagcaagactctgtctcaaaaaaaaaaaaaaaaagatcaaattgttatatttctcccccagataaaaatgatcataagccagccaaatgattttttttggattaaactaacaattagattgcataggtttcataaaaagtctttataggttcaatagtgatgtcagatgaaagatacaactttggagtgatttaagaaaatattttggaatatcaattttgtaacttgctgaagtttacaaaaatcaatgagtgaacttccaaaagcagatcatcatgactgctccatctggaaccaaaatctgccatataaattcaaatttggcaatagttaactggaaagaaataaatgataaccactcttgcttgttttgttgtttgttttgatctttggagtaatggctagccagagagaaacctcatttttttcaagtggtcaaatgcataatgcttattttatttacttatttattattttttattttcatttttttgaaacggagtctcgcttcatcacccaggttggagtgcctcccaaagtgctgggattacaggcgtgagccaccgcgcccggcccacaatgcttattttatctatgcaaacactgggctattttcacaggacctcattagattaaaaacaaaacaaaacaaaaaaggctacagaacttgagagtggctgccatggtcccttttaaagctgttctagctgctgatttgccttttaggcaacagaatgatgtttaatcacatttctcaatgtgaatactaagaaggaaattcctgttggctgtcaaaacgctaccatgatacaaatagcatcaaaagcagtgactctgcctaggaaacaatgtgaatgatgttcattttcataccaacgacatagatctcatttcatcagaggactccagaatggtcttttgacttttctttttcgtttcttttgagatggagtctagctttgtagcccaggctggagtgctgtagcgcgaccttggctcactgcttacctctgcctccaggtttcaagtgattcttgttgcctcagcctcccaagtagctgggattacaggcgcccgccaccacgcccggctaatttttgtatttttagtagagacagggtttcaccatgttggtcaggctggtctcgaactcctggtctcaagtgatccacccgccttggcctcctaaagtgctgggattacaggagtgagccagcgtgcccagcttattaggcaattttttttctttttgttttactaagtgctgcctatttgagaaaagcaataccataactttaaagccactgtttctgtaacacttaaactacttcgcatcaacataaaaccaaaaggtactaagaatttagcaacaacaaaagttaccaatagaaatagaaaattaatatgctacgccaactcagcagagacacagtccaattcaaaccttaagtttcttgtactgtgctctgaatgccttaacagattcaagggaggttaacattcgagaactttgaaaagctgccatttttctcatgtggcaggcagctttcaggccttcgttcccattgcaggaacaacggggaatgtaaaatgagatggccccgttaggttgtggtacttagacttagtgccaacatcctctatcactgaaacgaactgaaatccctatgaaatactcagatccctgcctctgatttttaaaaaaacaaaacatcactgctgcttgcttggttggtgaaaaacagaagagaataaaacatttctccaaaatgtcaaattgctggttatttttttccaagtacttctgatataggataacaaaaaaagtggtcattcagaacaggtgagttgtaggcaatgacacattagtagagcagtatctagaaatctcatgcctattaaacttaaggacagttgtcaagccatttcttatctattttttgtggcacctaaatcagtgcctggcacaatacatgtttgtggaaatgaatcacaacacagggaaactgaatgatgtttatagtccatctaactatagtggtttaaaaaaagaaccaaatagttattttcagccacatgctgtaattactgtaaagtatttttaaaagttcgccttgaacactcactgcaaataccattttctgctacttcagcttacttctcccacgtgccatgagaagtctaccattagccaacttgactaaaagccactaaatactggttttagtagatagcttaatgactgatttggtggaaattactttgcagaaataacaatttccaattaattctttgaatttagtttaatgttgtgggtgtattttaaaatagcacctaatatactctcattacctgttttgcaacagggagtaagtacacagacaatcattaaggagacttcaaaaaaaaacacagcaatctttcattactcaggagaaaatttatagatcccgctgaaccgttaaagatcaattgttttatacagcatttgcattggcttttaaatttccaaacaccaaggagtgtccatcccaaattagccctttgtcgtctaagagatagctaagatgcccagtactaacctgttgttttttcctgaaacaaggtcttgctctgttgcccaggctggagtgtagtggtgctatcttggctcactacagccttgacctcctgggctcaggtgatcctcccacctaagcctcccaagtagctgggaccacaggtgcaggctaccatgcctggctaacttgtatttttgtagagacaaggtctcaccatgttggccaggctggtctcaaactcctgggctcaagtgatccacccgcctcagcctcccaaagtgctaggattacaggcgtgagccattgcacccagcctctttctcttctttttaatttgaggtgaaattcatctaacataaaattaacttttttttttttttgagacggagtctcactctatcaccaggctggagtgtagtggcgcgatctcagctcactgcaatgtctgcctcctgggttcaagcaattctcctgcctcagcctcctgagtagctgggattacaggcacgcgccaagatgcccggttaatttttttgtatttttagtagagatagggtttcaccatgttggccaggctggtcttgaactcctgacctcaggtgatccacccacctcggccttccgaagtgctgggattacaggggtaagccaccgtgcccgaccttaagaatacagttaagaatactgtttggtatactaagcaggcatattttacatagttacaagtagaaaatgagttacaaagctttgggttcaaagtatagaacatcaacactttgtcttaatatcctcaataaaaatttcacacaaataccaacactcgctctttttttttttgagacagggtttcactctgtggcctggtgtgcagtacgctggtgtgcagtggctcaatcaccgctcactgccgccttgatctcctcaggctcgggtgatcatcccacctcaccctcccaagtacctaggactacaggtgtgcgttagcacgcccaactaatttttgtttttgttttgatagagacaggggttggccatgttgcccagtgtaatcccagcacttcaggaggctgaggcaggaggactgcttgaggccaggagtttgagactagcctgggcaacaaagcaagaccctgtcaaaaaacaaaaacaaaaaacagaagaaggattaatagttacattaagaagaatgaggcggctaaggaaaagaaacccccaccaagatattataagtggtaaaaggtaccaaaaagtgtgactagtatgctaacatttgtaagggaggggggagtttactcataaatgcttgatagctctctggaagaattcacaagaaaccagttatggtggttgcctccagggaagaaaaaaaaaaatcccctaatgactggggcagtcacacaccaggtgtggcctattcaaaaatacataaacaagtaagaaataaatcatgcttttaaaatctggcttttcccccaattccccttctttaacagagtgtattcaatcttggctgaaccctcagagctcactggcgtgtgtaactgactttagagagagccaggaggtcgggattgcacacaatagggttagctgaaggtgaagcacctagggctagagacttccccggccaagggcaaggcagagctgggataaaggagttcaaagccctgaggtggaagaaggctggtgcatataaagaaggagaaggcagcctggccggaggagactgtgttgcaagagggaccagcaacataaaaggattgtctaaatttagctttacttggagttgggaagtccttgttgggtttctgctcagatctgagccccactcactccatgttaggtgatctgggttcctaagtgttctcccaacagtaccctctcggtgatgcctacaggatcccatggaaacgtcatccttttatcgtgagcatttggcatcttactcagtttccctggactcaatcttccatccacgtgagtgtatcctacatttccctctagtcttttttcctttcctttctttacttttgccccatgtccctaggactggcccacaattcagactggttaccaagtacctagtgtataaaatagtaccctttactctccctgtgagctgccttgcctgatctcggccacatctgaagaatcaacatacatataacctttaggttggcttacatttgccgtcatttaacccccaggtccctcaccccaagcttgtgagctgggtggggtccatactacaagcaaatattatctaaataaacagaacttggccaggctcagtggctcatgcctgtaagtaatcccaacactttgggaggctgaggcaggaggatcacttgaggccaggagttcaaggctagcctgggcaacatagtgagatcctatctctacccccccccaaaaaaacaggaaataataataaataagaaatttacaaaattaaaaaattagctgggcgtggtagtgtgcacctgagtcttagctactggggaggctgaagtgggaggatggcttgaggccaggaggttgaggctgcagtgagctctgacagtgcctgggtgacagagcaagaccctgcctgtctcagactattgcacattggtgacacgtaattgaacactgctaatggagagtatctgttgcccactcatgcaactaacattttacattttcaatttttctctaacaatccaatgccaatttctagatctgcttgaagttatcagaaagtctttatcccacccaactacttccaacttctctctagggttttcttccatctctaatgactgttcattccgctttctcaattactggcatttcataatccaaggaaagtgagaaagtgaaggaagaagccatcgtatcatcctgtttttcatttccatcaggtggttgaatctttttggcaaataaagcacttgactgcctaaaatttttctgcaatgacattgtttatctaccttactcacttgctgatctgccaaactgacaaaataaacaataaaccttagccaaaaggtttctgttcagcaaactactccctgatgccaggcggctcacgcttgtaatcccagcactttgggaggccgaggtgggtgaatcacctgaggtcaggagtttgagaccagcctggccaacatagtgaaaccctgtctctactaaaaatacaaaaattagccgggcgtggtggtgcacacctgtaatcccagctactcaggagactgaggcaggagaattgcttgaacccagaaggtggaggttgcagtgagtggagatcgcgccactgcactccagcctgggtgacagaacgagactctatctcaaaaaaaaaaatagtccctgacatttttgcctatggagtcacacccaagacattcaatctatgtaccgaatgcctcacaacttaaggaatgtgcctgatgattctaggtgtgtgtcactttttgaattgttgaaccctttacaaacctcctgttaacattagcatttatttgagctacagtgtgggactcaacataaaatttctaagtaaagtttctaactttagaaatcgtctattgtaattggcattgccatgttatctgctcattatgaatcagtactcctaggatcactatttcagtgtcagttgatcctggaactcagattaccttgaaacacttgagttgaagggactcgaggtcacacagtctagtttataccaaattcattgatcacgtccacaatacccctaataaaaaagtgatcattcagtctcgacatggaattcaagatatcaatggaaggccgggcgcagtggctcacgcctataatcccagcactttgggaggcctaggcgggtggatcacctgaggtcaggagttccagaccagcctggccaacacggtgaaaccctgtctctactaaaaatacaaaaattagccgggcgtggtggcacatgcctgtaatcccagctacttgggaggctgaggcagaagaactgcttgaacccaggaggtggaggttgcagtgagccaagaccgtgccactgcactccagcctgggtgacagagacagactctatctcaaaaaaagaaaaaaaagatatcaatgaaatatcatgacaaccagcaacatgtggaggtggataatgatagccaacactagtagagtttatttcgcatataatcttatggagtaggcactatcattatctccattttacagatgaaggaactgaggctaaatgacttgtccaaaatcaatcagttagttaatgtcaggatatgaaccaagcagtctagctccagatccacactcttgaacaatatgacacactgactaaattgtagaaatcttttaagaatgagaaaattggccaggcacggtggctcatacctgtaatcccagaactttgggaggctgaggtgggtgatcatctgaggtcaggagtacgagaccagcctggccaatgtggcaaaaccccgtttctactaaaaataccaaaattagccaggcagggtggcatgcgcctatagtcccagctacctgggaggctgaggcaggagaatcgcttgaacctgggaggcggaggttgcagtgagcagagatcatactactgcactccagcgtgggcaacacagcgagactctatctcaaaaaaacaaacaaaaaaaagatcttaaaataaatattctttcaagatttgaggagtgaacacaatgaataagcagcagagacagaactagatctgagatgcctaactttagtctggctgatttactgcctccagaacagtaattctatttcacaactaaagctatagaaagttgtgggtcaggtgcagtggctcacgcttctaatcttagcactttgggaggccaaggcgggtggatcacttgagcccaggagtttgagaccaacctgggtaacatggcaaaaccctgtctctaccaaaaaacaaaaaacaaaacacaaaaattagatgggcatggtgctcacacctgttagtcccagctacttgtgaggctgaggtggaaagatagcttgagcccaggaggtggaggttagagtgagccaagactgcaccactgcactccagcctgggcaacagagccagaccctgtctcaaaaaaaaaaaaaaaaaagttttgtcttttgttttatattcctcaaaacaacacttctgaagtagattggcatggctcatatttcaaggaagaggaaatgaaatttgggggggaaatggcaaaaccatatcttactaaaggaaattgcaatgaaatgtccccttttgtgactcagtggttatgtggttatgacaataatgtaaaaaccctgagattttatgaaaaatgacagaatcaccatattcaaagtgtatgatcatgtgacaagaaccttagaaaaaactgtttatggagtttgcattatgaagacattaagccatcatgaagtcttaatgtcttcacatcagagctttttggtttgctattttctcattttcagataaaaaagtataaaactctttgaatgttcctcaacttttaaatttcatattctaagcattttttcaaagagacaatgatttcattttatctttaaactagaataaaaggatacatggtagctttgtccttgaataaatgaagaaggggtagtgttaatactatctattacaacttctaaggatattgttccagttactattgttgtataataaatcactcccaaaacttgatgggaaacaaccattttatcatgggtcaggaatttggacagggacaacttttctctgctccatcattgctgaggcctcagctgggaaggcttacaggctggggggacccaactgctgggcgttagaatcatctggaagcccttcactcatatggctggcagctaagtatgactgttggttgagacctcgactgagctgtcaacaggaacctctatggttggcttctccgtatgtctctctatgtgtgctgtttgggcttcctaacaatatggtgactgggttttaaaagtaagtatcctaaaagcgcaagaaaaaaacgcacggctatttgtgattctgcttcagaaatcattaaaaaaaaaaatagggtctcattgtgttgctcagggtagtctcaaactcgtgtgttcaaacaatcatccccctcacctctacccccacctgggcctcccggaaaaaccaggattccaggtatgggccaccatgcctgggggcatcactttaaccatactctattggtcaaggctgtcacacagatctgcctagattcaaatgaaagtggtataagtcccttctcacccactcagtgggaggagtcttgagatcacattgtaagatgagcaatgtgggatgggcaatattgttgtggacatctttccaaaatataatctgtcccacatgtgaagtatctctaagaaagataaagaggaaagttaaacgatatcaggtacaacagaaatctcagtcaacaaggtgtgaactgagtaattctaaactttctctttttatctccatgtcaaaataagcacatgggcagctttcaaaggaaaagcctacactattagtctgtcttcaaaagcctattagaatgatgtgtgatattaacttctgattactaccaaaaattgaatgcccatcagtggacatttttttttttccacttatgacttggtacattagttctacttctaagcctatcagaacctccagctccacttattatgttgttataacaatttgcaaaccaataaactcttaacagtctatacccctcccagtctaaaacacggttcacacaatggttctcagtgaggtaaacactttggcaaacagagtgcagagttactgtccaaaagggcaacacgttatgacagctatgctaggtaacagagttccaaagttaaataaagtgcttggaggaatgcaactctgccaagagcttagcattttaccaacttaattctagctttctggttatccaaatttatatctccaggctggatctcttccctgggctccagatgcatatactaggctatcgacgcaatattagataattagttatataacaggcatcttgtaaaatgtccagcactacacttcttctccccatcaagctcaatcctactgttctccgtctcattcccttgtttttgtccatagcatttatcattatctgacacactgtaaatacagattacatataagcaaaacattttttactatttggttaactgccattttccctttgcctagaacaatgcttggcacataagtagtttaaaatattgttctttctcttttcttttttttttctgaaacagggtcttgctctgtcgcccagcctggagtgcagtggtgcagtcactactcactgtagcctcaacttcctgagctcaagcgatcctcccaactcagccacctctggctaattttttgtagagatggagtttcaccatgttgctcaggctggtgtcaaactcctgggctcaaccgatccgcccatcttggcctcccaaagtgctaaaattagaggcatgagccagcatgctcagccctataatctttttcaaatgaattaatgaatgatgacttatctgggtacctgaataagtcattactagaaaaccatagagaacaaagagtaccttaaaatgatgataatgtttgtcagtagctgactgggtaaggaagtagaatattgctagattttagatttgctataaagaataaaaatgagcaaaaactgagaatgcatgagaaggaatcaaaatgttaaacagtgctacctaagccacatcaaaactacctagaagagcttttaaaatgacagattcttataaacggccaagtgcagcggctcacacctgtaatcccagcactttcggaggccaaggcagggggatcgcttggactcaggagttcaagaccagcctgggtgacatagcgagacaccatctctacaaaaaatgcaaaaatcagcctggtgtggtgttgccggcctgtagtcccagctacttgggaagttgaggtaggaggattgcttgagcccgggaggtcaaggttgcagtgagccttgattgagccactgtactccagcctgggtgatggagtacaaacaaacaaaaattacagattcttacacataaaaaaactacagatttctcagacttgccaatttggggaatgctagaaagtgatgagataataaatatccagcattcaatctgggtacctgaatataatcgcaggcatgaaagattgaatagagattggaattaaaaagacctaaacagggccaggcacactggctcatgcctgtaatcccagcactttgggaggccaaggtgggtggatcacttgaggtcaggggttcaagaccagcctggctaacatggtgaaaccccacctctactaaaaatacaaaaattagctgggcgtggtggggcacacctgtaatcccagctactcaggaggctgaggcaggagaatctcttgaaactgggagccggaggttgcagtgagccgagattgcaccattgcactccagcctgggtgacagagcaagactccgtctccaaaaaaaaaaaaaaaatctaaacataactaactgtgctatagtctgcctaaagaaagaatgggttaacaggaaaggaatcacctacacagcatctataaaacagactctattctaactgtaacgtagactgtcctccagaggaggcagaagcctagggctcccattgtcatcagccattacactcatccaatcctattttcattttatgctctccaagaaatgctataaagaatttagctttccacccagattagcctacagggcgagaacgtacggatcagccaacatgaatattcagtctgcttatgaatatacttctcactataagtttaaaattcattctggtttattcaacaggcttgggaattaggttagtgtgagtcacctccaggcatattgaaaataagaaatttgctagcttaaaagagctggggaacaaaccctgataaccctaacaaggttgtatcatctgagcagagacagagaggacaagaataaagtgctggtaggtttaggttttgcacccagctggtggaaaaaaggacctgtggcctatatttgatttaccccacaagccagagcagggaacatgcctcccccttgaacatcttgaagtgggaggaggcagagggtggctcctaggccttctttgttcactactaggccttcccttgaatgtccaaggctccccagcaatccattttagccttattccacccacatataaacaggttgagaaatgcaatagatagaaaggctctctactgaaacccactccagtaatccagtcagccaatcggcccagcgtggcctgaagctaccgagctcctctccatccttctccacactgaaaactggcaccataggtacctgctttcagcagttcaagggtatttcccatgctctcaaggtgaggtcatagtcctcacatggtttttagctatagtctgcctcttcaggctcctattacaactccatcacctgctcatcatttgagagctctgtgccctccatgaccctttggacataccatttcctccttcttttcccggaaggctctgtccagatcccctccacccttctgaacaccccacttcacctgtaaaacttactagtccttcaggactccacttggatgccatttccccacctgagttacactcctgtacacatttccatggagttaccctaccttagtccttattacacaataatttctttctttctttctttcttttttttgacagggagtctcgctctgttgcccaggctggagtgcagtggcacaatctcagttcactgcaacatccacctcctagattcaagcgattctcctgcctcagcctcccgagtagctgggattacaggcgagcgccatcatgcctggctaagttttttgtatttttaatagagatgggatttcaccatgttggtcaggctggtctcaaactcctgacctcatgatctgcccgactcggccttccaaagtgctggtattacaggagtgagccactgcgcctgacctgatgaaatttttacaattttgtttggtttccttttatgtacaaagttataaacactgagcactaccaccactactcctcttgccaaaaatggccgtaacaagaactaaacctctcctagaatgacagggagacttcacacgtacaccttacttttgaaactgaacaatgtaaataggctatttttaaggataagttaaaataaactttttttttttttttcccagacaaggtcttgctctgtcacccaggctggagtgcaatggcacaaatacagctcactgcagccagcctccaactcctggtctgaagtgatcctcccatctcagcttcccaagtagctgggactacaggcatgcaccactatgcccaggtaattttttaatttttagtagagatgggatctcagtatgttacccaggctggtcttgaacgcctgagttcaagctatcctctcgccttggcctccccaaatgctgggattacaggtatgagccaccgtgcctggccaataagtaaaatgtaaattttaaaagtcagtcatggtgaagaatatattttacatacacatatacacttatgaaatctaaatgtccttgcccaaacatttccagaaatttccatatctgttccaatgcaaatacttctaaacctcttcattatctctgccaagaagaaatcaatcccaaactaagctgataggcagaataattcattagatgtttcaagcagcaaatatccagctttttaggtgaggaaataatgtgacttcagtggaacttttttttttttaaagtggtaataatagccaaagaaaattatttccccctagaaaaaacttaaatcttaagaaggcccaagtatactgctaaaaattagtatgattagtgttttggagtggattttatttttcttcaaggaggaaaagataaacatgctattaatatgacctcctgaaattcagatttcctgtccaaagcaacgatttccaggcattttccaaatattaggtttattgtattgttaacatgtacaccaaattttaaatcagaaggctaggacagaaaatagctcatttttcatgaatcctgcttaccgcaggagagttctacagtttgttcccagggaccagagtttttttcattaaccttccccatgattataataatttgtgtttacctatcacctttcatccaacaacctcaaagtactttacgaacaatctctcacctttatgccttcttgtcaagagaaaggcaagcatcataccatactttatagattgggaaagcgaggaacagagatgcaaggacttgcccgatactaataaatattagattaggtaagcaaggcaacccaggctgagccctccagcactgcctcactcaactgggagcacccacaccgtttgtccccagagcctgtctggtctttaaatggatttcaggaacccgttctcaattttggctgtgcaaatagaagtacaaggggaggagattcctttacaggtcccaagttttcttctgctatagataatagagaaagtgtttcgtttcttgttcctgaagactcaaaactttaaaaccctgaatgtcggccaggcatggtggctcacgcctgtaatcccagcactttgggaggccgaggccggtgatcacttgaggtcaaaagttcaagtccagcctgggcaacacaggaagacccccccacctctacaaaaaaaacttttttaaaaaagttagccaggcagggctgggcacggtggctcacgcctgtaatcacagaattttgggaggccgaggcgggcggatcacgaggtcaggagagtgagaccagcctggctaacacagtgactaacatggtaaccccgcctctactaaaaatacaaaaaaaaaaaaaaaaaaaaattagccagtcatggtggcgggtgcctgtagtcccagctactcgggaggctgaggcaggagaatggcatgaacctgggaggcagagcttgcagtgagcagagattgcgccaccgcactccagcctgggtgacagaacaagactctgtctcaaaaaaaaaaaaaaaagttagacaggccagctgcggtggctcacacctgtaatcccagcactttgggaggccaaggcaggtagatcacgaggtcaggagatcgagaccatcctggctaacactgtgaaaccccgtctctactaaaaatacaaaaaattagccgggcaaacgcctgtactcccagctactcgggaggttgaagcaggaggatcgcttgaactcgggaggcggagattgcagtgagctgagatcataccactgcactccagcctgggcgacagagcaagactccatctcaaaaaaaaaaaaaaaacaagttggtcaggcgtggtagtgtacacctgtggtcccagctaatcaggaggctgaggcgaaaggctcatttgggcccaggagattgaggctgcagcgagccatgtttgtgccactgcactccagcctggtcaacagagtgagactctgtattcctccttgttctttctcaatttccttaaaaatagttttcgccaagacatacttctgttgggcaaattcagaaacttgatactactcctactaattaatatccacacaaatttatttaaattagaaaagagaaacaataactggctttgaaaggattaggagattactagacatctatgaagcatctgcttgagtacgagcttcattcatgactgtttctgctggctctgcagcatttagtggtgtgagtcattgattctcagtgattctcaatatgaataacatcaactgttttataaagcaaaatctactgcagtgatggggaaatatgagtgagtggtggggataaagggaactgtgcactactaacacagaagatccagtttttggccaagtggctaatgcctgtaatcccagctctttgggaggccaaggtggaaggatcacgtgagcccaggagttcaaggccagcctgggcagcatagaaagaccccgtctctacaaaaaaaatacaaaaattagcagagtgtggtgacatgtgcctgtaatcccagctacttgggaggctgaggcaggagaatcacttgaacctaagaggcagaggttgcagtgagtcgagatcgtgccactgcaccccagcctgggcaacatggagaagtggcaaaaaatgactcgctgcccagctgcaaggactgtggctagcatgcagcctcctttagggtccacctcatcttttgagtcgagggcatctcttcttgtagcacccccagccaatgactaagcaagctggcagccaaggccatcctcttcttgggacgacctctggccaatgataaaggaaggcagagatacagaggccgagccatttctgccagaggattcttgtgtctgctctggagctccccattggcctggtggggactctgtcaggtctgcatcgtgatctgatggcttccactctttccccttcacaggtgttactccccagtaaaactgtactaatgactccatctaagcctcttcttccaggatattggcacaaatggtagttaccttgctggattcttgtaacaaataaacaagatgatggatgtaaacactttgtccagcacctggggcatagtaggcactcaataaatggcagtaatgataacaatcattcgagactttaagataatagagaggtcaggcacggtggctcatgcctgtaatcccagcactttgggaggccaaggcgggtggatcacctgaggtcaggagtttgagaccagcctggccaacatggtgaaatcccatttctactaaaaacacaaaattagccaggcgtggtggcacacgcctgtaatcccagctactcgggaggctgaggcaggagaatcgcttgaacccgggaggtggaggttgcagtgagctgagatcgtgccattgcactccagcctgggcgacaagagcgaaactccatctcaaaaaacaaacaaacaaaaacttacatacccccaaattactctctaatataacacacatatttggcctcatcattaaaaaaaaaagtttttttaactaaacacattactaggctcaagctagtatgagtgtacaagtaaaacaggaaacaaatattcctttataaacactaattccagaagacttcacacccacattctaaaatctaattagattaatttcccagggcattcatgtattcttagtagctttcaatttttaagtgtcaaaataaagccttatttttaaatgtgggtggtgttgatgaaacaagtatgagtaatacttgcaggaaacataatattagctttagctgcttagtgggtgatacttgaatagtccttcaaagaagcactttccatgtctcaccaatgtaaagcatgagttgtaatgtgttcacatagtaagtatagacacttataaaactcttttatgtgcttaaagtacagttttgcctaccaaaatggcaatttacacaaattttcaggattctgtctaatgtacaaagtgagggcaacaaaactgatatctaaatatcaactgcaaaatctccaggcctcccacggtttgttttcttttaatatccactaaacagaaaagacatgtgcaaaatttgttctcatggagaagtaaggatggcaaaactaagttgattttgtttctcttctgaagcagttctgccctacccaccatggttcagggagtattatctcccctgttggtcttgccatgttcatcccaaacagaaatctctgaagggttaagaaaaaggagcagtaggccgggcgcagtggctcacgcctgtaatcccaacactttgggaggccgaggcaggcggatcacaaggtcaggagatcgagaccatcctggctaacaaggtgaaaccccatctctactaaaaatacaaaaaattagccgggcgcggtggcaggcgcctgtagtcccagctactcgggaggctgaggcgggagaatggtgtgaacctgggaggccgagcttgcagtgagccgaaatcacgccactgcactccagcctgggcaacccagcgagactccatctcaaaaaaaaaaaaagaaaaaggagcagtagaggccaggcatggtggctcacacctgtaatcccagcactttggaaggcagaggcgggcagatcacttgaggtcaggagtttgagaccagcctggtcaacgtggtgaaaccccatctctagtatgaaaaatacaaaaattggcagggcatggtggtgggggcctgcagctactcaggaggctgaggcatgagaatcacttgaacctgggaggcagaagttgcagtgagctgagatcgcgccactgcacgccagcctgggtgactgagcaaaactccatctcgaaaaagaaaaaagaaaaaagagcagtagaagagctagggacgattgttaatagggttctccaatttagcattcaagggcagtaagaagaggtaataattatccaatacctggaactgttaataatttgttactttaagattaaaaaactagtttaaaatttcgacacactagggaaaaaaattcaacacactataaagtgttcttatataaacatatgtacacatatcatgcctaagtagaatgaacaacagagaagggataatttttcaaaccctactttaaaggcaaaaaaggtacttagactgtgtgtatttgggggcagaaaggatatggaaaatctctgtaccttctcaattttgctatgaaccgaaactgctctaaaaaatagtctattttccaaaaagatacctaaaatcatatatatattttacaactgccgaagtgcagaaaggtgttataattatcttcccattatttttaaaaagcaaatgttaaaacaaaaggaaaaaaagggatttattcatttatccaataaatatttattgaactcctacacagagtcaggcattgttcccagtacagttggtagacaatcctcaaacggctgcctcttgaaagtgcacaccacgatcagggtcaacatattcaacagttgaatgtatattatatgcctggcatggttctaaaaatcacaggtaaaaaaaattacatacagtcggccgggcgcggtggctcacgcctgtaatcccagcactttgggaggccgacgtgggcagatgacgaggtcaggagatcgagaccatcctggctaacacagtgaaaccctgtctctactaaaaatacaaaaaaattagccgggcgtggtggcgggcgcctgtagtcccagctactccggaggctgaggctggagaatggcgtcaacccgggaggcggagcttgcagtgagcagagatcgtgcgacccactgcactccagcctgggcgacagagtgagactccgtctcaaaaaaaaaaaaaaaagacatacaatcaacacaggtggctcttttttttttttttttttgagacagagtcgctctgtcgcccagggcggagtgcaatggcgccatctcggctcactgcaacctccgcctcccgggttcaagcgattctccgcctcagcctcccgagtagctgggattacctgcgtggaccaccacgcccggctaatttttgtatttttagtagagatggggtttcaccatcttggtccggctggtctcaaactcctgatgtcgtgatctgcccgccttggcctcccaaagttctgggattacaggcgtcagccacccaccgcgcccagcccacatgtggcttcttactatgctaaccaatatgcattattcaggtttctctgttctctttcttgtacatacttcatttctcattagcaccagagcaaataaataaagacagagaggatactaggaggcagcaaaaccaggttctgtcactgaataatttgttagctgcaaagagaataattacgaggaaggcttaattttccaatggatttattcatacttcacactaataagcaagctaataaaaagctgaactaacacttcagtaacctgtcacttccctcagtaagtaggcaagaaaaaaaaaacattcaaatgtaagcaactcttgctttgccatttctccaacaaccagccacaacttcaacaagtcagtgaacatatttaccttactaacactgcctttttaacaagtcttgagtaaatgtattttggttaattttacatacaaacatttttcttttgactctgatgttacaagctagaggtaaaacctactttctatgcttccacgtagatatctttcaatgtatataatgtaacttacaacagattcagactggtgtcttgtgcacaccatagttgttcaataaaaattttgaaaattgattaaaaggcaatgttatgaagagctatgttatgaagagttgtaaactattttattagaacccaatcacttcaaaatggccatgtaagcctgggcgaggtagctcgcgcctgtaatcccagcactttgggaggccgaggcgggcagatcacttgaggtcaggagttcgagaccagcctggccaacatggtgaaaccccatctctactaaaaatagaaaaaattagccaggtgtgataatgcacacctgtagtcccagctactcaggaggctaaggcaagagaatcactagaacctgggaagtgaaagttgcagtgagccaagatcgtgacagtgcactccagcctgggcaacaagagcgaagctttgtctcaaaaaaaaaaaaaaaaagaaagtttatttctatggaggggttaaagaaaaagtaaaaaagaaagaggaagagaaaggttttactccctctacaaagcaggatgtggcttaggagcaggtcttcagtgtaaaatgcacattagaaacctgtagtttctaaaagcctatattgattttaacctgaagtcctaaaatgtatgtaaaatctgatagtatttgtgaaggtccctgaaagctgcaaccacctgttacaaataattcatggccacccaaaccatagctctttctccatctagaagaataattctgccaagtttggcttgagcgccccatcattatctcattatacatgtgcatgattccaaagccaccattcaaggaaaacccttaatcactgccctccgctgggctacccaatgtaccgcacatcaccaagtctctgaccaccggagaaactggggtttacttttcataatccttcattattctagtttttttaaatctcaaaagctactaagccttatacatctttgcatttcacctgaaaacttagattttgcatttctcttagtagcacaatcatgtgttcattccttttcctatattaaactgtaagctactcaaaggcaaatgctggtactcataagaatgtcttttttaacgtcaagcgtggtggctcacgcctgcgatcccagcactttgggaggctgaggcaggcggattacctgacatcaggagtttgagaccagcctggccaacacggcgaaaccccgtctctactaaatacacaaaaaaattagctgggcatggtggcaggcgcgtgtagtcccagctacttgggaggctgaggcaggagaatcgtttgaacctgggaggcagaggctgcagtgagccgagatcacgccactgcacgccagcctgggcaggcaacagagcaagactccgtctcagaaaaaaaaaaaaaaagaatgtctttttaaaaactcctcattgccatacacttgcatatatagaactgttaactgattcattcttcctcataaaattgtcaagtgaaaaaattacaaatagttcacatccttctcctttaaaactattttccaattatttttattgtagaaaatgtcaaatatatatactagaaagaatagtgtaatgaatacttctgtactcagcatttggcttcaataatggccaactctgtctcactatctcccatctactaacaacccaaattattgtgaagcaaatataagatttcatatcattaatatttgtatatattccagttcccatttattatttttttcttttttcttttttcttttcttttttttttttttaagaggaggcctctccagatattccccaagctgttcttgaactcctgggcccaaaagatcctcccgactcagcctcccaaggtgctggcaatataggcctgagccactgcgcccggcctctctcatttattttcaatcactcctaaccctgccttccttcccacttctgcaccctcaaaaagaaatgtacagaataatgcaagcaattgccgctgttttagcagttttgctcatagccactgcctctctttggaattatattctatcccattcaccaacatcactgaactgtccaccaaggtattgtgttcggtccctatttcactcagaaatatattgtacattttccctccataattccatccacctgtctgaacaagtgaaaaaaaaattgtgccacaatttctactgtcttgacaaagattacttctgatttgcttccccaccccagataagctaaagagagctaaagggagtggaaggattagaagaggaaagaaacttcaatacggtactcaaagtcatagattttgcctaaactggtgtgtgcaaatattttaaactattttattttcaaaatggatacttgtaaacatcagcggaaattttgtcatgaatcccttttaggcagaagatgtttataaaatgaattatcttaatttaagggagctattgccctcaggattttggtaataacaaccgtagctgcttctgtacctaacaaatggttatgtaaaaacaattaaagcaaaagaaaacaaaacaaaaaacaagggaggatgtgctctgtttctgtaattgctctaaccttgttttattttgatatgagatttcttggcctcatctcagatagcaacaccaccctacactttctcctccacaccctttgcaaatagaattccaaaaggtagttcaggcactttagagttcatcctgggaaatggctcaccttgagggcatttcagtgcagtaactgagatttcgtctgctccttcccgggccgccgcactgcccatcccctgcccagtgatttccccaggaatccggggacggcaggaaaagagctccatccacagccagcccctcgcctttccggggacggccctcagccctgagggctgcccgtttaccgtgcgcatcccccggccaagcatccccgcaaggcgcccctcaccgccaactttccccactggaaactcttctccgagcaaccgttaaagatcattgacctcgcgaacgcctcttcctgaggtagatcacgtaagatctctccctaactcccactttcccctccagaccagacgtcgcagtgcccacatctcactcaggattgagctaccccgaaagaacaagtgcgcccggagccgccacgggccagaagtcctcgcctccagagcgaagaccgcactctcgccccagcaccccaaaacccgacccccggcgctcgccccggccgccccgctcccggggaagtgcccgatccgccagcgcctccgcggagccaggacagaactcgcggccggggcgccccgagacccaacgcagcgccgcgcagccggggcctccacgcccccacgcccggtcccggccctccccgggcatccgcggctcgccccgggggattagggctcggcccgacacacacggcccgctccggggcgccggggacagggaggcccgcccgcgccgttcctcaggccgccggggacccgcaccaactcccctcgcctccgaaggacaagccggcccgcacctcctgctcgggccaaggcggacgaggggcattggaaccccgcctcctccccaggccgcgaggaccccgaccagcgcgccctcgcctccgcccagcagcgcggcccgcgccccctccccaggccgcggggaaacgcagcgcgcgccccgcatctgcccgcgggcccagcccctcactcacccagagctcggtgccccagctcatggtgcaggggacgcgaaggggcgctccgcgcggcgggcgcggctctctggtccccctccccggcgatccctttgccccccgagatccccgcgacggcggaaagcccggagtccgcgcggcctcctccggctcgcagctcctcgcccggggtctcctcggcggctcctcctccccgccgctccacagcaaaatggcccgaggaagcagcagccgcggccgccgcagcgcccgcccgccctacacccggagagcgggggaggggcgggaggggaggggcggggccggtctgacagctcgcgcacgcgcgcccgccccaccccggcccggccccctcccccgggctcccccggccgggtccgcgtcgccctggggtccggaaggacgcggagggaggtgtgagggacggcgggacccggatccctaggactccccctgccaatctggtaatgacttcttagtgaccactgtctgctcgcagtactagcgcttgccttggaacgcggcaggccctgggatcaccgatgctccgccgcggtctgagatcgctcccctgcgcgtatcgccgctctggatttaaggacaatactttcccctggcagccatgcgcgccgagcagagtcagcccgggaggctcttttcccaccgcccgagggaagcccgagagtcccgcaggctggcgcggtgggagtggggcggtggtaactgcgcgctgtgcgaatagagacgtcgaggcaagcgcgacggcctcgagtggctagggaaagaatccaggggcgtgcacccagtgatttccaatctctgaaaccagtgatttccaacttgttcagccaagaaactctcaggcgtgaaatcacgttaccgcctagtgggtaaaagcaaaggcgtggggtacacagataacttgtttggttcaaatccagcctcccgcacgtgctggccgggcggaggcggacaattgctccacctctggaagcgcagagcgcagtccaccaaatggaggcaaataacgtgtccatctcactgcccggcggtgaggatcaggggtgggccaaggccgaaggttggtaaacccagcgctcattttatcagcagacggactccctctctatatatccaaaggtctgcacaaatgttcctgacaagctatggaaaatgtttggaattccaactcctgaatcactagccctttccccacagcttatctttctccctcggttaatgctactactggatccttttctgagaaaccgtgcgactcccaacatgggcccccagttaaaaaatattttacgatgatgcatttctccaatcccaccccaccattttcaacctgcttatcattctcctccattaaaaggtggagctaacccgggtctggtggctcacgcctgtaatcccagcacatcaggaggcccaggtgggaggatggctggaggccaggaatttgagaccagcctgggcaacatcgcaagaccctgtctctacaaaaagaaaaaaaaaaaagttagctgggcatggtggcatgcacctgtggtcccagctacttgggagactgagacaggaggatcgcttgagcctagaaggttgaagttgcagtgagccatgatggtgccattgccctccagcttgagcaacagagcaagaccctgtctcaaaaatattaacaataatgaattaaagccgggcatggtggctcacgcctgtaatcccaacactttgggaggcagaagtgagtggatcatctgaggtcaggagtttgagagcagcctggccaacatggagaaaccccgtctctactaaaaacacaaaagttagctgggcgtggtgacagggcgcctgtaatcccagctactcaggaggctgaggcaagagaatcgcttgaacccgggaggcagaagttggagtgagccaagattgtgccactgcactccagcctgggtgacagagcgagactgtctcaaaaaataaaataaaatgaataataataataaattaagaggtggagctactaaacaaaaaacaaaacaaaaaaaaacctcttgcagataaacctccaactctacttcctttgttgggcagttacaataaatttaagttgtcaaaactgttttggtctgccttttttcagttacaaccctcccttcctgcccacccccattcttgtgtctgtataaatattttgctctcagttaccaggtctgaattctctttcctccagagactgctagatatataacaatgagaacggccagctacctatctcctaaggcagattaatagccagagtgagttggagggggaaattcaaacaatgctgcacagtttagtctgctaaaatttggaaacggtacatgcaatgcaggtttatctaacaagacattgcctcagtaatcaccttcctgccagggcttgactttttagtcaaatacaatgatctaatcttgaccaagttattggagacttctcaaaaacagtgaccacttgtgaaaatactctaatcaagaagtaaaacaacctgctgctttaaagaggagaaagaggaagaggaagggacagcagaagaaaaaaagagaccacatgaagatgaaactttttaagacgagtaagcaggagattgttagttataggaaggaacccattaaaagctgccgcagaactctatggatgtgagttaattatacaacactgcaaatatctttaacttcattaagctttggcagtaactggaaaatgcttgaaagtgtcagaatcttcaaaaaataaaggagagagacaccaatgatcatgaagccatgagataaaatgaaataagccagcagaaaaaaggctaaaatatagcacagcattttttaggaagaactaaatccatttcagtttcccttcagagcaggaggaagtgattctaagacaaggaagtatccccattaacaaactactgtgacctgacctacttaggaatcagttttcaccaggggtactctaaactctatgtaaacgctgatattatctagggggttaatctgggttgcagatactggtttcacctctcagtaaaatctagggaacactgatttacaaaattatgatcttggtgtgatattacaaaatatatattttgtcgtcaaccttgtttcctgaagtatagctcctaaaatccttaaaaaccccaaaatgatgtctttttatatactaatgagatgactgatggctgacagtccctaagtattagtacctcaagatgggactggtcaccataaagaccaagacaagattagaggtgtgggacttttatctgcacccacactgtcactccaacctccggggactggggagaggcgctgaaagttaagttgttcagtaatggtcaatagcttaatcaatcatgactacataaaataaagcctctattaaaactccaaaaaacaaagttctgagaacttccagatagctaaacacataaaagtccctagagagttggccggacgtggtggctcacgcctgtaatcccagcactttgggaggcagaggcaggcagatcatccgaggtcaggagtttgagaccagcctagccaacatagtgaaagccctgtctctactaaaaatacaaaaaaaaaaaaaaaaaaaaaaaacaccaaaaaaaaaattagcccagtgtggtcatgggtgcctgtaatcccagctgcttgggagactgaggcaagagaatcgcttgaacccaggaggcggagggtgcggtgagctaagatcgcgccactacactccagccactgtactccggcaacagagtgagactttatctcaaaaaaaaaaaaaaaaaaaaagttcctagagggtggcatgcccagagagggcacagaagttccactctccttcccccgtactccatatatctcttcatctatatcctttataataaacatgtttccctaggttctgtgaggcactgtaacaaattaaacccaaaaaggaggacttgagatttctgatttataaacagttcgtcaaaaaagacagatcacataacctaaaacttaagattgacacctacttggggtggggggcagtcttgaggaccaagccctcaatttgtgatatctgacactatctccaggtatatggtggctgaggcaggtgaagtgcgaggctgcagtgggccgtgattgcaccattagactatggccagggtgacagcaagacccagtctctaaaaaaaaataaaaattaaaagaacactaaattaaaggacactcagctgatgtccactacaaaattaattacttggttggtggtgggaagaaatcccaacacgtttggtcacaaaagtcccctatgtgaattattaagtaaaaaacaaaacagctgggcgcagtggttcacacctgtaatcccagcactttgggaggccgaggaggatggatcatgaggtcaggagttcaagaccagcctggccgacatagtgaaactctgtctctactaaaaatacaaaaattagctgggcatggtggcgcacgcctgtagtcccagctactcgggaggctatggcaggagaatcgcgtgaacctgggaggtggaggttgtggtgatccaagatcgcaccactgcactctagcctgggcaacagagcgagactccatctcgaaaacaaaaagaaaaacaaaaaaccctgtaagtttatgtttttttttttcctactctcagtgggggactcaaacatgttccactgaataatctgatcacatggacagtattagcaacgaaataaggtatccggtcaaacagaacagagaccctgtatagatggctgtgtggttagaggcaaacaattgtattagggctttttggcaattctaaccctgcttgcaactaataaacatctaattcgggatcttaggtggacagatatttatatagctgtagatagatatgagattttaaagcagatagggttttgaaattgttaaattgggatcccagtgttccactacttattagttgtgtggccttctgcaagttacttacattatctgagcttcagtttactcattgagaagacagggatcttggccagacgcagtggctcacgcctgtaatcccaacactttaggaggccgaggcaggcggatcgcttgagcccatgagttcaagaccagcctgggcaacatggcaaaaacccatgtctactaaaaatacaaaaaaattaggtgtggtggtgtgcctgtaatcccagctactcagaaggctgaggcaggagaatcgcttgaacccaggaggcagaggttgtagtgagccgcgatcgcgccacttcactccagcctggcgacagagcaagactccatctcaaaaaaaaaaaaaaaaaaaaaaaaaaaagacagggatctcataggttgtcattagtctgaaatgaaggaactggggttgagtacagtctttggtgttagccagatttgtatagttctgtccagacagctatagagagctttggctgaattactttccttctctaagcctcagtttccttttttttttttttgagacggagtctcgctctgtcgcagtgcagtggc

SEQ ID NO: 239 - DNA, 1830 bp, Homo sapiens
gcagtaccgaaaaatgaaaaaaatacttttccaagagacacggaatggacccttgaatgagtcacaggaggatgaggaagacagtgaacatggaaccagcctgaacagggaaatggacagcctgggcagcaaccattccattccaagcatgtccgtgagcacaggcagccagagcagcagtgtgaacagcatgcaggaagtcatggacgagagcagttccgaacttgtcatgatgcacgatgacgaaagcacaatcaattccagctcctccgtcgtgcataagaaagatcatgtattcataagggatgaggcgggccacggcgatcccaggcctgagccgcggcctacccagtcagttcagagccaggccctccactaccggaacagagagcgctttgccacgatcaaatcagcatctttggttacacgacagatccatgagcatgagcaggagaacgagttgcgggaacagatgtcaggttataagcggatgcggcgccagcaccagaagcagctgatcgccctggagaacaagctgaaggctgagatggacgagcaccgcctcaagctacagaaggaggtggagacgcatgccaacaactcgtccatcgagctggagaagctggccaagaagcaagtggctatcatagaaaaggaggcaaaggtagctgcagcagatgagaagaagttccagcaacagatcttggcccagcagaagaaagatttgacaactttcttagaaagtcagaagaagcagtataagatttgtaaggaaaaaataaaagaggaaatgaatgaggaccatagcacacccaagaaagagaagcaagagcggatctccaaacataaagagaacttgcagcacacacaggctgaagaggaagcccaccttctcactcaacagagactgtactacgacaaaaattgtcgtttcttcaagcggaaaataatgatcaagcggcacgaggtggagcagcagaacattcgggaggaactaaataaaaagaggacccagaaggagatggagcatgccatgctaatccggcacgacgagtccacccgagagctagagtacaggcagctgcacacgttacagaagctacgcatggatctgatccgtttacagcaccagacggaactggaaaaccagctggagtacaataagaggcgagaaagagaactgcacagaaagcatgtcatggaacttcggcaacagccaaaaaacttaaaggccatggaaatgcaaattaaaaaacagtttcaggacacttgcaaagtacagaccaaacagtataaagcactcaagaatcaccagttggaagttactccaaagaatgagcacaaaacaatcttaaagacactgaaagatgagcagacaagaaaacttgccattttggcagagcagtatgaacagagtataaatgaaatgatggcctctcaagcgttacggctagatgaggctcaagaagcagaatgccaggccttgaggctacagctccagcaggaaatggagctgctcaacgcctaccagagcaaaatcaagatgcaaacagaggcacaacatgaacgtgagctccagaagctagagcagagagtgtctctgcgcagagcacaccttgagcagaagattgaagaggagctggctgcccttcagaaggaacgcagcgagagaataaagaacctattggaaaggcaagagcgagagattgaaacttttgacatggagagcctcagaatgggatttgggaatttggttacattagattttcctaaggaggactacagatgagattaaattttttgccatttacaaaaaaaaaaaaaaaaaaa

SEQ ID NO: 240 - DNA, 31737 bp, Homo sapiens
tgtggggtggggggaggggggagggatagcattaggagatatacctaatgctaaatgatgagctaatgggtgcagcacaccaacatggcacatgtgtacatatgtaacaacctgcacgttgtgcacatgtaccctaaaacttaaagtataataataataaaattaaaaagaaaacaagaaattaacagacatacaatttatcttcgtgaattatatttactaatgcactcaatatctaatactgttttttctgcatttgaaggtgttattggtctttaagtccatactgtggtcccaggaaatatgagattgtgttgacttttgtcctataattggagaagaagcaaaaaggtgcgaaattccattagtctcccaatcatcagcctttctgagtgtgttgtggaattaagaataatgtttatgggttgccagagtataagatgtgctcccaaggtactgttaaaagctcttttgagcacagtggatttctgcctctgaattatcgatgagcctcacttcggaaatctttggtcatctgccatctctgcccttggaatgacattctttcagttgagccctcatttcatttatagaataacaattacttttaattttcacaatgaagttgctgcagatttgtattgtatttctgattaacagccttgtaccccttgtaagggtcaatgaaattgggaaattatgctaaaaagctgctatatttttcttgaaggatagcaacagctttctgttagtaactttgattttattttatgtttactataagtattaacttaaatgtagctttttacagaaaaatattcttgtttctaaaaaatagagttagcattattgatatggttaaaatgagtaccttagtttgcctcctgggataacatagagcatagcttgttgattttctttatttttatttttttagtttcccacctatctctctgatctttcttcttgttcccttttggagatgtatctttctctgtccatctttaaaatattggttattcttaagatactgttcttgaccttcttttttttctcgctaaaactgctttgctctccttgaatactcttatccattatcatgactttaactatctgttaaatctgtactttgacccggatgtctctaataaactccaaaactatttagttaattctttatttttcgtccacctaaatatccatcatgttcaaaattatattctttttttaacttttgcttttaaataatatcttccttagttattcctcatataattgagtgaaaacactttatatacagccacacaaaacagaagcctggggagcacacaaaccagaaacctggggagcaccccagctctgcttggcttcctcaccacacaccaagtcactgaatgctgataattacatttccttcacatgttccatacccattccctccagcctgtccccatggataccatctcaattcaggtactcactgtcacttgaaaatgcagactctacagatagcttgggctcacagtatccaatctcattcttttaaacaatccttcacattaaccaaacattaatctttgtaataacatatcttagtcaaatcgttctactctttatttccaatgaagtccaacagaagctcatttttgaacctctttcccagtattattattggttttattgctgtgccctccttataccttaaggtgcatcctggtgtgtctttttttcttgtggttacttctttattattcttactcagttttacaattttcactgaaatctcttaactcctccatgcaaagtcaaagccttcctagattggacctaattcctccggtaccaatgggaaaataacttataatcttctaaatctccagactcagatgtcacttcaggcataattgaataggtgaggtccagcctggcatgtcttcctgaagagtgtctaaactttccatccacagcaaagcctttccctatccactttcagaaggatctaccccacctttccttgctgcctgcagtatactgtgcacacgtgtatcccaggtcctacaccgcttatttgcatggctcacttgtaggcagaccgtaaactcttggaagatggagacagtatctcactagtgtttgcttttccagtgtctaggatgatcccacacagagcagatgctcaataaatgtaaattgaatgagcgaattaataaatgaatgattaattattcagtatctacacatggataattgtggatataaaatatctatatgtagataatatatgaataattgaaaagcatcctggcaatattttatttagtcctccagttttaggtagttagtaagcttactttatttttgttaagtgcttcagctattttttctaaccactgtccatagttacaaaacttttcttgttattcttccagagatttcaggacaaatattcattgagcttctttattctgtgcatagaaatacacctgctttgaaacctttatagtctgtgagccaaaatgataggcatatttccgagtctcccctgttagctcacacattaacaacctacatctctctggagtaaagaacccagtgtgttctgacaaacgagatttggatgtttctctctaaaatgttgcccaaccagcaaacacacacacacacacacacacacacacacacacagatatatacataatacatatacacataagggacgtacacataaaggggataatcagaaacattttcaaggcatcctctgtctatgctttattatgtgaatataaacacagcccttacacctgaggcatcattatatcaaaagttttgttgaactttaggagtatatcatagtaaaggtgaaggtgtgagttacacatttgctgcccttgaaacaccagggcttctcccatgacacctcttcaaggccagccttactctggcttctgtcttctcttatttcctacaccctatatcaaatctcaggtactatgtggaaaggcctcaatctttctcaccacagtgtgggagggttgatagaagtattttttttctaatctatcaataccaagttagaattaactaagaaggagaagattttcaagcatttatgacagaagcatgatgctctgcctcctccaagctccatttaatccatccagggcaagactgagatccacgaacttatcacaatccaaatacttacggggtgtaatttgcaatgtggcccctggagaatgcatgctcttgttactacaagagttttatgtgtagagatccagctggttattaagccatcacctgccagcttttttttttctgaatgcccatccccagggcccagagaaatggagacaggaggataaactacttttgtttgttctggtagacacagagtctgactgctgtgtatcctgtttcccttagggactctaccttgtcctcagggacaatccgtgaaggcttgagtggagataaccccaccataaaacctatactgctggtgttcccagagagcaggctgcagtctgcatcagcctatgctaagaaaagagagacaactcctgcatctggaaattccttctctcaggggctgctggtgggagcaagatcctcagctctggccttcaaaagctcctgtgatctctgcacaatttctctaaatagaattatatttctgagacaagaccaggcctgataccacagtgagtaaagggtcttttgcaaagtctggtagtttagagaagctagggtctggatgaaggcagggctccagaaatcagtacattgaatgggagatacagaggtaatttattggcagacagtttcctgggctaaaggtggagttagcatttgcagaggtggagtcataagctgcacattgagaatgacgcattgatcatttaacatttgtgtacttctatgaaacatcctggtttcccctttctatagcccctgtggctatgtggttgggggaatgacaagcagagaaaatttaagaagagtctgaagacttgattgaaatctaggatatgctctttgaatgttattcctaacgtaatgcctttcattcgtccatccatccatccatccatcaattcatccaacaagtgtagtgggcattgtgccagcaacagcacctggtaagaaccagggaagcagccctgcaaaggggtggggtgaaggcaggaatcagaatattatcctgttaactcttcacatagataaccacttgccctggccatatatcagaaatgacttcagtgaatgcttgctggattagtgatggcaaactttcttggcttgcatgcaaagggaaacagccagattttcctgagttgcttcaggaagtaaaacatttaatgcaagctttattttccctaaaactagtaaacacagggaaggaaacctctttgaaattgcatttgtaaacctcatttcctaattcatgcttttacgtattttctctaatcatttactggagcacctgcatgtgcaatgcactctgcacaaattacaaaataattgaaaaccaaatatggaagagaaagtgggggaaaatatgcaaagtaaataaattagaaagtaaaacacataagaacatggctgtgatccttactctaaaataaaatggctagccattctgaaaaacaacttactctgtggctgcccttctgatagcaaaaatgtgggtcttgcaatccaagttaagtaaaattctgtgggactggatatagtatacatcaccctgtctgcatttacactagttctctgaaccaaatttattttctgctttactctggattaaaggatttggcataatggctccgaaaaaccttgctgactgagtcagcaccctgtgtgcaccataaaccccctccttctgttaactgactaatccggatctgcatttgctcctcagcacatagctcattgccacagcagagtccaacgcaggtactgtcacaagggcatgacaaaaaatcagacatgggtcacagaattcattctcctgggatttccactcagcctaaggattcagatgctcctctctgggcttttctccctgttatacgtcttcaccctgctgggaaatggggccatcctggggctcatctggctggactccagactgcacacccccatgtacttctttctctcacacctggccatcattgatatttcgtatgcttccaacaatgtccccaagatgctgacaaaccttggcttgaacaagagaaaaacaatctcctttgtcccatgcacaatgcagacctttttatacatggcttttgctcacactgagtgtctcatcttggtaatgatgtcctacgatcggtacatggctatctgccaccctctgcaatattctgtcatcatgagatggggagtgtgcacagtcctggctgtcacttcttgggcatgtggttcccttctggccctggtccatgtggttctcatcctgaggctgcccttctgtgggccccatgaaatcaaccacttcttctgtgaaatcctgtctgtcctcaagttggcctgtgctgacacctggctcaaccaggtggtcatctttgctgcttcagtgttcatcctggtggggccgctctgcctggtgctggtctcctactcgcgcatcctggcggccatcttgaggatccagtctggggagggccgcagaaaggccttctccacctgctcctcccacctttgcatggtgggactcttctttggcagcgccattgtcatgtacatggcccccaagtcccgccaccctgaggagcagcagaaggtcctttccctgttttacagccttttcaacccgatgctgaaccccttgatctatagcctgaggaacgcagaggtcaagggtgccctgaaaagagtgttgtggaaacagagatcaaagtgagggatgccagggaaagtctagagggttgaagatttgctcccaatgagatttgtaggaacagtggtgtaaatgccttacagtctcatctcttagatttctgatatcaagaatgtatattgattggattctatccctaaacgtggagtaccatgcagatcacaaagcacatgcagacaggcgctgagccgtgtggtgcagcagaggtgcaaagtgccatgaactcctactcccaggtcccacccctacccaggatctgctttctgttcttttgaggcttagttctctcaagcttcctcttaaattcctctattatttccatctctttttgccataagtatatgctggtaatcccataccatatgctactataagagagtacttgtaatcacacagaataaatactgaccttggttaagcagccctctactgggaatgtaacaacaactaagagtatagaaaatgcctggtttggaacctaaagcctaaggatgatgatattagtactggaagttcatctaaatcaccctaacaaatctaattctgtaaaaagcaaagtttaattgtatagatttttttatataaaaggcagagaaatatcaggatctttgtttcatttcacttaattctgcaccatttaattagaaagagtttggaaagattttgcatttaaaataaatatgagagaatgttattagggatagttacctttttcataattcagatcgcaaagccgggtgtaggtgacaatttatcattacggtgattacataaaatattgtagtagtaagaaaatactgcaaaggaagaaagcatcaagggaaactgacagcttgatgtaacatcatagaccaccgcttagaaccaagaacatgtcaagtcttgataaagactttcaggaacctcaacaaaattccaaagagaagctattccaggtgacataaatcacttttcctggacccaagtggtcagaatgacatggacaggtaatttgttttattttaacacaagtctgagtcctaaatgatcagcataatatgataatatgatttctttaacacattgagtatggtaccttttggaattctctcttttttctctcaacccttgtagtattgtgtgaattcaactgtatgacccatgatgttattacattatctgctgcctgtaccttttctatttttacaattttaaaatatattcttatcacttcatatatttcttcttccatgaaagaaagaagcaaagggggaactctttcctcccaccccctctccaaatgcactgttttcttttcagttctcaaaaagcctagttgctgactattctgctcatccattcatctcggttaaacattctgcctctggtgatggtctttgttttcatatctccatactgtgaggacattttttggcctgcagaaattcacaaaccttgctctgcccctcccaaagagagcaatttgaatttaaaaaaaaatactggatctaaatttaactatcaaccactatggaattattgtgtgcactactctgaagctagaaagagaaaacaggcagtattttcatatagaaaggactttctaactatatctgaaaaaaattattacattccctaaaatatgtatacttcatgttctgcttaaaacctttaaaagaaaagggaaagaggaaacatatagaatagttcatctcatataaaacataagcaatagatttggattcagaatttttttacctagggtacagtggaaaaatcagggggtataattcatcctatgtcagttctaagtgattgggaaagaatagaccaaaaagactacatttctacagaaagtgacaaatatagataaattataaagaaatgttctctagcaggtcttaatagtggctctaattttatatatatatatatattgaatacattacagaaaatacctgagtatatgaaaaatttctattaattgtttccatatttgagttgtaggattttaacaaactaattaaatgttggtgttatgaccgctttatatatacatattttcaacattaatcagtttttaaaggtctgggggaaagtgaaagaaacaattgcattgttttaggctgcaagttctactgactgcttcacaaatgttaccccgtttatcttgcataaacatcacaatggagtcgctattattttctccacttaatagataagtaaacaaagttcagaatgatttaataacttatcctatactatgcaaccagtaatagaactgagtgttatggatcgtactgattgcaaacccaagctgcttcttagcagctttctgcccaaaacattacaaattttagctcaacaggggttagactcaacatccacatgatggggcagagtctggaacaaaacggagtttacagtattatagccaaagtcttaacaccagaaagaatacatcctgtagccaacccatctttggaggattcattaccacctttgggaagagtagaaacactcacattagcagcatcatcattttccaatagtaactccctcctaatgcctgtctgcaaaatcacatggcctcataaggcattgccccaaagggacaatctgaacgagagacaccctgctgttctcagtgatcatcttacctatgattctggtcttctttctatcattaggtgtacccacctgtgttctttacctttatgatgtgattaatgcttttccaggaagtgtccccatctctcctgtgtacagatccgtgatggacctaccttaccagtgctctaggctgctaggactgagaaagggggaacccagcacaggtgcaagctgagatgcttgctatgttagattcacatctcaattgtgctacaacttgctaaataggtctgcttctaggaataatatagcctcctcaatcctgagttttattttaggtcagatgtggctaacaaggtttcagctaggtgccttatataacttttatgaatgctaaatgaaagactttatgtgactctgatttgaagtgatgtatttttgtgagaaggatataaggacaatgaaaatgaaaaatgattacatagtaagactaagagctggtaaaattcatgactaaacaactataaaactacaaaatccaattttattttaatgattcataaattattatgatacttactgaacaatggaagtttctcaaaaaatctcagctctttgtgtttgcaactttctgtgcctgtctttgtttttatttggttggtgatattggggaaggtctccaccaaaggaggttgaaggttagtacacaggaggttgggtatgaaatggtgttcattgttcctgctagtagacaaaactgtaagaagaatcctacataaaattttacattctctatatagcttcaattcgaaaaggattcttgagatagcatccagataggaaatatatacaaaaataattagtccatagctttgttacgttcattctcctacccacacactaagaattctcatcaactgtgtatctagaatagctcctctaggaaatctcagtctctgtatgtagagatagaaactcaccctggtgacaccttgttagttggctgaaattttggcactcatagtagccaactccttatattggtctccctggccttactattgccctggatactaatcatattaggaaagaaatatatagatgagcaaataaatgagtgcatagccataaataatttttgaaatgactgtgtttccatagcccggaaaaaaggaggaataaagcaaacaggataattgtcttcatatgtcccatcgagaatcttgcaggaggcaaacatagttgtttattgccttccacaaagtggggaaaaataccctagaatcaaaaagtaggtttacataaaagtggaattaacatcaatatgagaaaatatttttgaacattataagttatgcaacaatgaggtcttgtgaattattgtgcagccttactataaatagaaacataaaggttgagtaaaatataaatacgttgaacaggcatttgcaatagagtctttccaatgtctcttcaatcttgaaaatttaagatttcataataaactttttcatctttttaatgaggggcggagtttaacctgattttaaacaaacttacagtcatttaaagatttttaaatggtaattctaagataatcttttttctgtcaaaatcccgtcttgttcttccgaggattcagcagagtcatcaaaagaaaatattcaagtaggaaaaaattgttgtataagcttcatacttgtggttctcatacttttattcccacaatgccatcacaactttatttctagatatacatggtttcacattttaaaatattagcctgatattcagtgatagtggctcaatgacttttgccttaaacacaggcacaggggcttgcacatgtaatcccaaaaactgaagagattgaggtgggaggatcgcttgagccccgtagtttgaggctgcagtgagctatgaccatgctactgcattccagcctgggcaacagagtgggaccccatctttgaaaaaacaaacaaacaaacaaacaaaaaaccccacagagcagtgacagattaaaccacaaggagaggaaatgaaaaagacaaaattagcccccaaggcaagataaacatctctgtggatcagaaacaaaacataaaatcagatgtgtgagtgatgcagaagccacgggttagccgactgtttgtaagctggcctgagtggagatagctttgctcttaggaactaaatatattaaagttcttcatgcaataatggggaactgaggcttagcaccttccttgaaaataaggtatggaggagggtgggagggactgacttcctttgcttactaatgaagaccaaaaaatgtactgtgctgtactgcttccctatgtagctagctgaagacttgtgagaacccaggccctgcgctgcaaccaaatgtggaatccagacacccactctgggtgctgggattcccaatatactcagtctcactataggtacataattctaaaccatttacgtaagatccaggtctggataggaagcccaaagagctgggccaagacaacccctgagcttctagatgagagaagagggagggagagagacagacagagagaaatggagagagaactgggtttttaaatctattttcagaagctgccaagagaagcagcccaaaatatcaacaactggaaaataaattcacttctgatgatgtcccttgtgcatgttcaggaatgaacaattgataaatatttatgtttatgtttaaatgcataaaagatttcttaaagatatgctaactattttagatggccagggattaagacggaaaataattagaaaataacagatggatcccaaaagataacaattacagagcttagaaataaaacacgcattccctgaaataaggactaactcttgttttttttttttttttttttgagacggagtctcgctctgtcgcccaggctggagtgcagtggcacaatctcggttcactgcaagctctgcctcctggtttcatgccattctcctgcctcagcctcccgagtagctgggactacaggcgtctgccaccatgcccggctaattttttgcatttttagtagagacggggtttcactgtgttagccaggatggtctcgatctgctgacctcgtgatccacccacctcggcctcccaaagtgctgggattacaggcgtgagccaccgcgcccggccaactcttcttaaatatgaaaaaaattcaactaacaggataaattctagatggagtacattatgggaaaaaatgtgaaatagaacatggaatgcataattttcccaaaatgcaacagagactattttttaagaaaatggaataaaaagcacatagaatctagactcagatataatatctatttattttataaggacgtaaaaataatgatgaaaataggataggacattattgctgaaatttttttcctgatggctaaacacatgaattctcagaacaaaagatactctgagtatcaagctacatgaataaaaataaattaatatctagacatatcataatgaaagcacagaacattaaggaggaaaagaaaataataaaaccttcagagaataaaagaatagctacaaaagaataacaaataatagtggacttcccctcagcaaaacagatgccaaaagagaatattcaaaaggattaggaaaactgttactctacaatttcacacacagttaaactgtaattcaagaaaaagagaaaaatgaaaatgttttcaaacaaagtctaaggaaaattacctcccttaggtcttcaacagaattattaataaatatattggatagaaaaaaagatgaaaacagaataaaagtatatagggtacatgcgaagcatacgagttgataaagaataatagtaaatataattgttgaatgtaaacaaaatagctttttatatgaaataataaaagctcttagcagctgtaacaggttgatgtaaataataccaatgaataattaaatcacggtaaagctcttgacttgactagaaaggtgaaaatgctgaataattgtagattgcattagaaaaatttataatttagtgtgtgttaaaaattcaaaagtagatcacatttgccatctttgagccccccacctctgctgcagttgtagcaggcaatacgtctgtcatccactcctcagtggcttcaccagcctttcagccagatacaaggctgttgtcctagtgattacagccacatgagtcactggtcagctcagcggctatcccgacctgctgcctgactcccataatcttcacccatttatgagtgagaacatgcaatatttgtctttctgtgcctggcttgtttcacttaagataatgatctctagtttcatccatcttgttgtaaaatacataatttcatagttttttaatggctgaatagtattccattacatatgtataatacttttttttatactttcatttattgatggacacatgttgtattagtctgttctcatgctgctaataaagacatacctgagactgggcaatttatttttaaaacagggtttagttgactcacagttcagcatggctgaggaggcctcaggaaacttacaatcatggcggaagtggaagcaaacacatccttcttcacacggtggccagaagaactgccaagcaaagcagggaaagccttttaaaaaaccatcagatcagcctggcatggtgactcacacctgtaatcccagcactttgggaggccgaggtgggtggatcgcgagatcaggagttcaagacaagcctggccaatatggtgaaaccccatctcttctaaaatacaaaaattaccgggcatggtggcacgtgcttgtagtcccagctacctgggaggctgaggcagaagaatcgcttgaacccaggaggcggaggttgcagtgagccgagattgcaccactgcactccagcctgggtgacagagagagacagactgtctcaaaaataaaaaaatagcataaaataaataaaaatcagatctcgtaagaattcactcactattatgagaacagcagcatgggagtaaccacccccatgattcaattacctcccaccaggtccctcccacgacagaggggattataggaactacaattcatgatgagacttgggtggggacacagccaaaccataacatttcacccttggctccttccaaatctcatgacctcacatttcaaaaccagttggcctttccaatagtcccccaaagtcttagcttattctagcactaacccaaaagtccaagtccaaagcctcatctaagacaaggcaagtttcttctgcctatgagcctataaaaatcaaaagcaagttagttattaatacttcctagatacaatgaaggtacatggattgggtaaatacactcattccaaatgggagaaatgggccaaaacaaaggggctacaggtcccatgcaagtctaaaatccaatatggcagtcgttaaaccttaaagttccaaaattattttctttgactccatgtctcacatccaggtcacgctcatgcaagagatgggctcccatggccttaggaagctctgcccctgtggctttgcagggtacagccctccaactcagctgttttcatggaggctttgggtgtctgtgactttcccaggcacaaggtgcaagctgtcagagatgaggcacttgtcggggactggactaaacgtgactcttgctatgctttatcaaagagactggtggcattttgcccctgccctagagatctgtggaactctgaacttgagagtgatgatttagggtatctggcagaagaaatttctaagcagcaaagcatttaagatgtgatgtgggtgctgttaaaagcattcagttttatgtattcacaaggatatggtttggaattggaacttatgtttaaaagggaaagagagcataaaagttcagaaaatttgcagtatgacaatccaatagaaaaggaaaacccatttttctggtgagaaattcaagcccactgcagaaatttgcgtaagtgacaaggaaccaaatgttaatcaccatttggggattatgtctccagggcagtgagaggtcttaatggcagccactcccatcataatcccagaggcctaggagaaaaaaaaagtttcctgggccaggcccagggccttgctgctttcttcagtcttgggacttggtgtcccacttcccaaccatggctaaaaggggcatacacagagttcaagctattgcttcagagggtataagctccaagctttggtggcttacatgtagtgttgagcctgtgggtgcacagaagtcaagaactgaggtttgagaacatccacctagatttcagaggatgtatggaaatgcctggatgtccaggcagaggtgtgctgcaggggcagatccctcatggagaacctctgctaaggcagtgtggaagggaaatgtggggttcaagccctaatacagaggcctcattggggcactgcctactgaagttcctccagaacccagaatggtagatccacagagagcttgcaccatgtgcctggaaaagccacagacactcaatgccagcacatgaatgcacccaggagaggggctgtaccctgcaaaaccacagggtcagagctgtctgagaccatgggaacccaccccttgcatcaatgtgacctggatatgagacatagagtcaaaggaaatcatttcagagctttaagatttgactgccctgctgttgtgggaagtcaggaacaccaaacagatggaccagctgaagccatctcaaaagaacataaattgtgaagatttcatggacatttattagttctccaaaattaataattttgtaatttcttatgcctgtctttactgcaatctctgaacataaattgtgaagatttcatggacacttatcacttacccaatcaatacccttgtgatttcctatgcctgtctttactttaatctcttaatcctgtcatctcgtaaactgaggaggatgtatgtcgcctcaggaccctgtgatgattgcattaactgcaaaaattgcttgtagagcatgtgtgtttgaacaatatgaaatctgggcaccttgaaaaaagaacaggataacagcaatgttcagggaacaacagagataacattaaactctgaccaccggagagccgggcagaacagagccatatttctcttctttcaaaagcaaatgggagaaatatcactgaattctttttctcagcaaggaacatccctgagaaagagaatgtgtccctgagggtaggcctctaaaatggcccccttgggtgcggccatcttctatggtcaaaactgtagggaagaaataagccccagtctcccatagcactcccaggcttattaggatgaggagattcccgcctaataaattttggtctgaccggttgtctgctctcaaaccctgtctcctgataagatgttatcaatgacaatgcatgcccaaaacttcattagcaattttaatttcgccctggtcctgtggtcctgtgatctcgccctgcctccattcgccttgtgatattctattaccttgtaaagcatgagatctctatgacccacaccctattcatacactccctcctcttttgaaaatcactaataaaaacttgctggttttacggctcaaggggcatcacagaacctaccgacatgtgatgtctcccccagacgcccagctttaaaatttctctcttttgtactctgtccctttatttctcaacccagctgatgcttagggaaaatagaaaagaacctacgtgactatcaggggcagattccccgataccctgctagagtttggacttgcatggggcttgtagcccctttgttttggccaatttctcccatttggaatggttgtatttacccaatgcctgtacccccattgtatctaggaagtaactaactcacttttgattttacaggctcataggcagaagggatttaccttgtctcagatgagactttggaccgtggacctttgaattaatgctgaaataagactttgggggactgttggaaaggcatgattggttttgaaatgtgaagacatgagatttgggaggggctggggaagaataatagggtttggctgtgtccccacccaagtctcaccttgaattgtaataatccccacatgtcaagaatggtggcaggtggagataattgaatcatggggcagtttcccccatagtgttctcatggtagtgagtaagtctcaggagatctgatggttttatacatgggggtttcccctgcacactctcttgctctcttgccagccaccacgtaagatgtgcctttgctcttccttcactttctgccatgattgtgaggcctccccagccatgtggaactgtgatccattaaacctctttcctttataaattacccagtctcaggtatgtttttattagcagtgtaagaaccgatgaaaacacccacattattctgtcttctgagctattcaaactgttgcaacctctgcctgttacccaattccaaagtcacttccacatttttgggtatccttatagcagtgtcccactctctgctgcaccaatttacatgttggtaccatatctttgctattgtgaatagtgctgtgacaaacatgaatgcagtaatctttttgatacattaatttattttctttcaggtagatacccagtattgggattgctggattgaataatagttttgtttttagttgtttaagaaatcttaaaggttgggaagtttaaagttcaaggcattagagtatctttatgcactggtgacattgcacctttaaatttctggtaccacagtgggtaacaccagactggctggcctaaattccattctgcattcttggagtgagctatggagatactgaccttgaattcacacagtttgctcacaggctcagaatgctccactcctactccatcactgagggctcagaattttttaatgacatagttgtcccttcaatgtaagatatccaaattatagattacacaggaaaatatggaatattttattaatatacatgtaaaatgagtcaaagtaactcccgagaagatatatcccttattttgtttaatgaaggaaatgaccaatagaaattaccgtaaacccagagaataagaaagcaattttaaaaacatgtacctggaaagctctgtctgtatctggagatcaggtttgcttagatactcaaagtgcaattaaagtggtttgaaaattcaaagcagctttagagtaccattataggagcactggaaaaataaaatgatataaaagaaaattagtaagctagacaaagggagacacttccttacgagaaagcttaatatcttagaagaaggattcggtaaatacaaaagaggaaaaaagtggtgcccatggtaatggttcttaaagttttcgtttttaaaaagagatgtttttgtcattggtggaactgaaaaggtaacgggtaatcaaagagcaatttgagtgaaagaggcatgatcttagtgagcaaattaaagtgctgcctcagaaagtgatatgatccagaaattagtagatggtgaaaaacacctcctgtatagaaggtctatgataacatcagccagaagtgcatactgtgagtcctctagaggtggatacaatgaatattaggattttgtgtcaattaaaaggtagcgacatcttagtatgtggaaaggctagttgcatcatacctaactaaatcataaagttgttattgtttagatgtttaaatgtatataaaagtgtgtttataaatgccaagctgccaaagggggatactgtactaattcctaagttactgtctttctgctccaaactcatccttccactctatgcttagtggtagctgaaagtccccaaattacctttgccttttgcccggatgacttccatttaggttctaccaatagggggcgctagaggaaactgggagcgttgagagggcaaaagaaacttgctcctcctacctgtgtgcttgctgctctttttggtgttacctcaactcttcacttgggcagttcccagagtcagcctcatcactcccaacctggggccatagttttagtggggtttgtggggggcactttctcctcagaggttgaagttcccacaccgtctctcctctgaatctgtaaattgtaatcactctaacctctgttctttcctgactctgtcctgtctgttcgtctgagagcttctttgttgctgctttccttcttcaatgttcatttaaccacgtatttatctaaattctccgttgaagtaccagagtgctttgttttcctggtggattcctgctggttcaaaaacaagttagaaaaacatttagaaattcgggacaattattcaagtaattataaaaaaaaatctggccatgtatgggagtttacaaacagcattaacataaaatattttttatctggtgtgttgcaaagcaatctagttattatagtttggtgtatgcattacttgcatgctgaatgaacatgccaaagaaatttaggaattgactgccaagcaaaggcaaaatgatgatgagccaaaaaagtgggagccagggttgacaatcttataccacctctttattaaactagcagagggagagaacaaatataaaagctaagtaacaggatgctaaacacaaaacacaaataatagaaagcccaaatatctcaatatttacactgagagaaaattgattatattttcccattttcatattgtattgtatttcatatttttaagcccataaaatacagttatatattatttgtaagactagctaaaacacaatcacaaagaaagtctgggaatatgagaatgaagaacacagcctatgcaaatatttaataagttgatgcggcaatataaatacaagctggatgtttgcactcatgtttatatcaggcaaatgcactaattggtatgaagagtactccataataatagaggtaaaactctatcaagaatatgtaacaatcataaatatgtatatacaacaatataaccttaatgtagaaataggaaaaaaaatagaattacactgaaaagattaccaactcaacttcttagtgggggaattagaaaaatgctctcagaaaataatagataatcctgacaaaaattggaaataaaaactacaaaaaatttacatgcttgatcaaacagatatataaagattcctacattccctaaaataaagcatatacattaaagtcaatataacaattgcaaaaagtgaatatatacaaaacaaaaaaacccctcatattttcaaagaatcagtatcacaaggattcattctcttaccacaggtgataataaatgtaaaattaacaacagaaatgtaacaaaaatatttggaaacctaaaaatgcacttcttcataatttgtcctttgaagatgaaatcaaccataatgaaagttctaaatgtcagacttaaaatgtatggctaaaatggtgggggaaaataaatttacagctaaaattacatttattttaaaagtaagatttataataagttaaatattcaactcagaaatatacaatgaccaaaaattaaaataaaaatagtatataatttatataagagcaaacgttattggaaaaataaagaatgataaacattattaaaatagaatcttagttcctttttcaaaaaatactaataaaatagactgatcagaaaaaaaggggaaaagatgtgtatatagaatattaggtacaaaaagttataaaaacaagatgtagattttttaaatgacaatagaatgttataagcaaaacttatttcaataaatttaaaagatttgaagatattccagttctcagagggaatgctttcaactttttcccattcaatattatgttggctgtgggtttgtcatagatggccttttttacattaaggtatgtcccttgtatgccaattttgctgacagttttaatcataaagggatgctggattttgtcatatgctttttctgcatctattgagatcatgtgatttttgtttttaactctgtttatctggtgtatcacatttattgacttgcatatgttaaactgaccctgcatccctgatatgaaacccacttaatcatggtggattatcttattgatatgttgttgtattcgtttagctagtattttgttaaggattttagcatctatgttcatcaaggatctcggtctgtagttttcttttttggttatgtcctttcctagtttgggtattaggatgatgctggcttcatagaatgaattagggagggttccttccttctttaccttgtggaatagtgtcaaaaggatgggtactaattcttctttgaatgtctagtagaattctgctgtgaatccatctggtcctggactttttcttgttggtaatttttaaattaccatttcaaccttgctgcttgttattggtctgtcactctcaccacccctcttcaacgtagtaccggaagtcctagccagagcaatcagacaagagaaagaaataaagggcatccaaattgataaagaggaagtcaaactgtcacggtttgctgactatatgattgtttaccttgaaaaccgtaaagactcctccagaaagctccttgaactgataaaagaattcagcaaattctctttggatacaagattaatgaacacaaatcagtagcccttctatagaccaacagtgaccaaacagagaatcagatgaaaagctcagccccttttacaatagctgcaaaaaataaaataaaatacttaggaatatacgtaaccaaggaggcaaaagacctttacaaggaaaactacaaaatactgctgaaagaaatcatagatgacacaaacaaatgaaacacatcccatgttcatggatgggtagaatcaatattgtgaaaatcaccatcctgccaaaagcaatctacaaattcagtgcaattcccatgaaaataccaccatcatttttcacagaattagaaaaaaaaattataaagttcatatggaaccaaaaaagagtccacatagccaaagcaagactaagcaaaaagaataaatctgaagccatcacactacctgatttcaaactacattataaggccttagtcaccaaaacagcatggtactggtataaaaatgggcacatagaccagtggaacagaatagagaacccagaaataaacccaaatgcttacagccaactgatcttcaaccaagcaaacaaaaacataaagtggggaaaggacacccttttcaacaaatggtgctgggataattggctagccacacgtagtataatgaaactggatactcatcacttatacaaaaaatcaacacaagatagattaaggacttaaatctaagacctgaaactgtaaaaattctagaagaaaacattggaaaacccttctagacattatcttatgcaaagatttcatgaccaaaaacccaaaagtaaatgcaataaaaacaaaggtaaatatttggacttaatcaaactaaagagcttttgcatggcaaaagaaacagtcagcagagtaaacagacaacccacagagtgggagaaaatcttcacaatctatacatctgacagaggacaaatattcagaatctacaacaaactcaaacaaatcagtaagaaaaaacacacaattccatcaaaaagtgggataagaacatgaatagacaagtctcaaaagaagacatacaaatcgccaacaaacgtgaaaaaatcttcaacatcactaatgatcagggaactgcaaatcaaaaccacaatgtgataccaccttactcctgcaagactggctataataaaaaactcaaaaaacagtagatgttggcatggatgcggtgaccaaggaacacttctacactgctgtgaatgtaaactagtacagccactatggaaaacaagtgtggagattccttaaagaactaaaagtagaactaccatttgatccagcaatcccattactgggtatctgcccagaggaaaagaggtcattatatgtaaaagatacttgcatatgcatgtttacagcaacatagtttgcaattgcaaaatcgtggaaccaacacaaatgcccatcaatcaacgagtggatcaagaaactgtgtgtgtgtgtgtgtgtgtgtgtgtgtgtgtgtgtgtgtgtgcatataaaatagaatactactcagccataaaaagaaatgaattaacggcatttgcagtgacttggatgaaattggaaactattaatctgattgaggtaactcaggaatggaaaactaaacattttatgttctcactgatatatgggagctaagatatgaggatgcaaaggcataagaatgatacaatggactttggggactagggggaaagagagggatggggacgagggatgaaagactacaaataaggcgcagtgtatacttctcaggtgatgggtgcaccaaaatctcacagatcactaaaaaacttacccatgtaaccaaataccacctgtacccaaatgacttatggaaaaataaaaaatatttggaaaatattacttacactgccttatgtagaagtagaaaatccaaaaccttaatgttcaaaaaattgaattggttaccagaattttcttctaatcaaagaacaccatgccatatagttttaaagacaaattttaccgatccttaaggaacagctaattttcatactatgtaaaacttattgagaatagacaaaagaagtacagcaatccagcttgctttatagggctagtataacaatgataacaaaactagaaaagtacagtagaagaaaagtgatttattgaacaaatctcaaaaatgaacataaatgcaaattagcctaagtgttagtaaaccaagttcagcattgctattatcaaacaaaatacatctttttcagataaaatataattttaggcaaaaaaattataagacatatagaaggcttttatatttataaaattagaaatagaaaaagaagagatataatttatgagtttatatatttaataaattggaccgtggacaacatatgggtcacagtgattgtttctctccaggcattagatgcccttgggcatcaatatgaggaagcagcatcttttcagtatatgaggacacaatctgaacaccaatcaccaacaagcctcttactgaacaggtctgatggggaaaagcacattaaaacctgctacaggtgagctctctcaaggttaaaataataggtttttttactttcttagttggcagtcataaacattaaaaaaactttaatttagcaaattacatcctgcctcctttatatttaagtataagaatggatttaggtaaaagactaaaagaaaaatttaaagcacaaagacaccatcggattgtctcagctggatttccggaaattataaaatagggtcagttcattttcatttcttcattctcagaagacagagaaaatagtaatagtcacagacctcagggattatggtcgtcctcacttcacctcacactccccttgcattcaaaatcactagaaattaaagaacagggattgcttcttggtaagaactgtccttgtttgtgctccagttaaatcttacaaaaagggttcaacaaatcccactgggatgctttatccttctttctgatcccttaacatgttgcccacagcttctatagctcttgctacctggtcctactttgggaattggattccttgtggagatttgatggaaaaaattacagaatatatgttcgggttgcacagaagataaaactcagtcaaaatgggatgggaatactatatgggttccacctgccctgaaacaagtgattctatttggaaggttgaatctatatgagttccacctgccctaaaaacaagtgaatctatttggaaggttagtaggtggggatattttggagttcctgaaactaaaataagcctggggaatctgtaatgtatgaagaggtcctggaagtaattgtattcctgcttaaatttctgatcatgaatcctacactgactgaagaaagtaacagcagcaacatcttgacatcaacatccttccagagaaaaccagagagataagtacagggagagcccttttccctaggacaggagcagatggcagtgtgcgtgatgggtctttatctctccactgcaacacactttcatagcatactgaggcatggttgatctaagcagagaataacgtcatctcttctgagagctatccaacctccactggggcacttttttcccccaataatctttttggaatgaaagagtttcaacactagcttacagatgctttttactaatttgtgaagctttacctaactcatatccaccttgttttctcatttttagttgttaatcctgatgtaaaatgtaagtttttatattatccaacctttatttattatacaatttcagaagcactgtaataaaaaatcacaatgcaaactgtaattcttacctgttaatgccaaatttctgctatttacagacttagctactagactaatttaacatttttctctttcagatatacctaatgtagataatttattttgatgcttttggtgttgaatttcttgtttaaattgtaaggtaaaatagttgtttgtggggggttgcctcatgtttctattgcctcatgaaattaagtagtggttttatagaacaatgggcctaattgactgcaaactagatttatgttacataagaagaagagtgacacaaaggatttgttttaaaatatgaaattcatttttctgagctatttaaacatgagaattatcatatttgtgagtcccttttttctaaatttttgtaggtacatagtaggtgtatatatttatggggtatatgagatgttttgatacaggcacgcaatgtgaaataagcacatcatagggaatgaggcacccagaccctcaagcatttaccctctaagttacaaaaaatccaattacattctttaatgtgaatgtaatccaattacattctttaatgtgaatgtaaagaattacattctttaattattttaaaattacaatgaagttattgactatggccaccctattttgctaacaaataataggtcttattcattctttttaatttttttgtacccattaatgatccccacctcctcccaatacccctgctacccttcccagcctctagtaaccatccttctactctgtatgtccatgagttcaattgttttgatttttaggtcccgcaaataagtgggaacatgtgatgtttgtctttctgtgcctggcttatttaatttaacataatgatttccatttccatccatgttgttgcaaatgactagatctcattctttctttatggctgaatactgctccactgtgtatatgtaccacattttctttatccattcatctgttgatggacacttagcttgcttccaattattagctattgtaaacagtgctgcaacataggagtgcagatatctcttcgatatactgatttcctttcttttgggtatatgccagtgggactcctggaatatttgtgagtatttttaatagtcttatcaatccaaccaggttacatgtgcctacaaacaagtacagtcttatatgccctcagctaagacatgtagcaggacgtaatatatgttcagttaatacctgtggatttatattttgtgatttagctacttggagatgggggaagatgagatgacaccattggtccttctattttattgtgtgcctttattatatgaaattttaaaagtagcattgttatcttcattggactcagatattgcaaggaagttgaggtgaaagtgaataacacttttctatacatttgggaccactgaatcctattgttggaaaggatcttggcattcttctagttcaacttctcacatgacaaaggaatcccatcttgaatagatggttaattaatctatgaattaaaacactcactgaaatcttcattcctaataaaattactaattttcaagaaggcaatttcaataatgatcagattatttattgactaagataatatcaccttccaataatttctactttgaattatgattcttgctttgaagcaaaacttatctacctttgctgatgaaatctttcaaatattacttgaatagggaactcattgataggaactcaattatgaatttttctgtttttattttagtgaaatccagatggattatgggctgaagaaggctatagagtcaggcaaaaaaacagaagcaataatttagaaattacaatgattcaaacctcagtataccctcttggctttggaaggattttaaaacatttgataggccacaaaaaaaaactaaagagtcaccataaataataagtagttatttatttgtacatgatagttaagaagctataaaatatgttaaacattctatgaatataagtatatggttagagttttagctctagttttggatagagatcagtattttttaaatcccaggctatgacccatcatgaaataattcagccagcacttttactaatgaaatagaatacattagactagaataaaacagaaaacaagcacattacacagagtaaggattcaattgtatatgtactcatgtgtgtatgtactgggtagacatttattactgtaggaatatagcagaattttagaaatttccaaatgcaactaaataaatcatatgtaacaatttcactgctgggtatatatccaaaagaaatgaagtgaacatatcaaaaagatatcttcacagccatgtttattgcagcactattcacagtaaccaaaatatggaataagcctaagtgctcatcaatgaatgaataaagaaaatgtgatatatatacacaatggtatattattcagccatgtaaaagaataaaatcctgccattttcagcaacatggatggaactggaggtcattacattaaatgaaacaagctaagcacagaatgacaaatattgtatgttttcacttatatgtgggagctaaaaatgtgcatctcatgaagacagagagtagcttggtggttaccagatgccaggaggggtagcaaaagggaaacaaaagagaagttgactaatgagtacaaacatatggtttcatagaagaaataagacctagtgttcaatggattagaagagtgactatagtttacagtaatctattgtatatttcaaaatagccagaagagaataatttgaatgtttctaacataaagaaaagacaaatatttaaggtgacagatagcccaagtacacagatttgatctttataaattaaatgagtatattaaattatcgcatgtaccctaaaactatttacatctattatgtatcaattaaaaattgttaaaaataaatttgcaaaaaacagaaaaatatatatacaaataaataatataaatacacatttatagtataagaagtatactatatatacagtagattactgtatgatgaaatgtacaatgaaatatacaatagattactgtagtccaagaaaggtgacaggtaactacattctgatcataagacaacacaaacagagtagaccctctatgggtacaaaagtcaagacacaaagatctctgtttaaatccagccaaagttagggcaaactgccattctcttaacttaattcaagattatgcaatcagtaaaaatcacaagtttaaaaaataattcataaaacaaaggcacaaattggtgagaagacctgatagcaggatcattgacatggtcatcatccctctttctatccttatatatagacatagacaccagcacacttccacatgcatggatataagtaccctgcaatgaaggaatacagaaggcaagcatctgatgtaatcatcacaaactgaggaaagagtccatgctattaaggcaatttaagtattaacatattttgaactgtaacgaaagtagatttgaaaataagatgtaatgaatactataatatcatactaacattgaatttatcatagatgacaaaatgtccttgtgcttcatttgtaatgcataattttctcttagtaagtgactaagatcaaaatataattgaaggtgttttcttagaaaacactcaaacaataatatgtacagttgcagcatgcttaaacatttgccttagacattcagacttggtgagctccttgtttcttctacagggaaatggggggaaatcagacttccatcacagagttcctcctactgggatttcccattggcccaaggattcagatgctcctctttgggctcttctccctgttctacatcttcattctgttggggaacgggacaatcctggggctcatctcactggactccagactccacacccccatgtacttcttcctctcacacctggcggtcgtcgacatcgcctgtgcttgcagcacggtgccccagatgctggtgaacctcctgcatccagccaagcccatctcctttgctggctgcatgacccagatgtttctgtttttgagttttgcacatacagaatgtctcctcctggtggtgatgtcctatgatcggtacgtggccatctgccaccctctccgatattctaccatcatgacctggaaagtctgcatcactttggcattgacttcctggattttaggagtcttattggcccttgtccatctagtgttactgctaccactgtccttctgtggaccccagaaacttaatcactttttctgtgaaattatggctgttctcaaacttgcctgtgcggatacccacattaatgaggtaatggttttggcaggggcagtgtctgtgctggtgggagccttcttttccactgtaatatcttatgttcatattctatgtgccattctaaagatccagtcaggagaggggtgccagaaagccttctccatctgctcctcccacctctgtgtggttggactcttttatggcacagccatcatcatgtatgttgagccccagtatgagagccccaaggagcagaagaaatatctcctgctgtttcacagcctcttcaatcccatgcttaatcccctaatttatagtcttaggaacaaggaagtccaaggtactctaaagaggatgcttgaaaagaagagaacttcatgaaagcctgaaagaatagtaaaatagctggcttcaaagggctttgagattacatctgaacccatccctactcaggatacataatcacactctagagaaccctttccatcttcttgaaattttcctatgactacctcccgagaaagcccattctgctttcctctctccagcattgaaggtcggagctgcacaattaataaaaatatgtttatactagctgtatagtgtacacacttttaatataattatgtgaaatattctgaaagttggaaataaatgtgtatctttttgttctgtaaataagacttgaaggcgaatttttgtagaataaggatatgggagttaggagagactgataacaaagtcattatttaattattcttaatttagaacgtgccggccagacacggtggctcacgcctgtaatcccagcactttgggaggccgagacaggtggatcacgcggtcaggagaccgagaccatcttggctaacacggtgaaaccccgtttctactaaaaatacaaaaaattagccgggcgtgttggcgggcgcctgtagtcccagctactcgggaggctgaggcaggagaatggcgcgaaccctggagaggcggagcttgcagtgagctgagatggcgccactgcactccaacctgggggacacagcgagactccgtctcaaaaaaaaaaaaaagaaagtgtcatatttaggccaggcgtagtgtctcatgcctgtaatcccagcactttgggaggccaaggcaaggagatcatgaggtcaggagattgagaccatcctggccaacatggtgaaaccccgtctctactaaaaacacaaaaattagccaggcatgttggcgcagacctgtaatcccagctacttgggaggctgagtcaggataattgcttgaacccaggaggtggaggttgcagtgagccaagatcgtgccactgcactccagcctgggtgacagagcgagactccatctcaaaaaaaaaaaaatgctatatttaaaaataggtctacatataaaatatttgcacatatttctctggtggtgacattttctaaggtataatccacgtagattagaaagagcatgagccatgtcttcacaggaaagagaatggagaatataactgtaatgcaactaacaagaaaacctgggcagatgtcatgctagtaaatatatagacatattggagccttctccgttcctttttctctgcttgtggagtgcaggggaaagccatgggacgtagagctgagaggaagagagcacaatgggaataacagagctcatggaagaactatatgttttctctcatgggtttggtcaattgtctcctattgaaaatgattaaaactcagaggagataatcctgaaaagtaagaacagactgtaactgttgtggctagttgatcaatattactacagctggaaattatcaggaataatttaattttaaattgaggtatttgaagtaattttaataatctttttattcaaacatgaaactcttccacttagttataaagtgatagaaaataatagtgaagaagtattaggaaaggatgtataaagatacttctgtttctcaactcttctctcaaattaagtataacttaattaagcctaaatatgcaaactgtataaaagggaaatattcaactttgttaaaaagatgtttttttgtgaaaaagtatgttgatgaggaaaatacatggatttttctctcacaaagcatcccttttgttaggacatctgttattgcagacatgatcacataaccaaaaaaaaagtgggggagtaaaaacacatgtactttgggttcagctagacctgggattttacaaagttctgccagttgctagatgtggaaacttttgtaatttacttaaattcttcagaaattattatgtataaaatgaggtcagtaatgccaagctcacagattgttgggaagattagaggaaatacatgaaaatgtttagcaagatctataactcat

SEQ ID NO: 241 - DNA, 31737 bp, Homo sapiens
gatctcatgagcactcacttgctatggtgaggacaccaccaagggggatggtgctaagccattcctgagaaatctgcccccatgatccagtcacctcccactagcctccacctccaacactggagattacatttcaatatgagatttgggtggggacacatatccaaaccatctcaatgacccaattatctcccaaagcttacctcctaataccatcaccttggtaatcaggttttcaacaaatcactctgagaggacacaaatgttcagatcatagcacagagtttttgactcaagcttctaggtgagattaagcttgaaagtaaagaaaatattttaaaactattagtggtagatgtacttccctatttctcctaagtacagttaaaaacactggacattttttatatatatatatatatatatatatatatatatatacacacacacacacacacacacacacacacacacacacaatatatgtatatatacacatatatatgtatgtgtatatatgtgtatatatacatatatgtatatatttacacatatgtgtatgtgtatatatgtatatatttacacacacacgtgtgtatatgtatatatttacacacacacgtgtgtatatgtatatatttacacacacacgtgtgtatatgtatatatttacacatctatgtgtatatgtgtatatatttacacatctatgtgtatatatacatatatgtatatatttacacatctgtgtatataggcatatatttacacatctgtgtatataggcatatatttacacatctgtgtatatatatatatttacacatctatgtgtatatatacatatatacacgtgtgtatatatacatatatacacgtgtgtatatatacatatatacacgtgtgtatatatacatatgtgtatatatttacacgtgtgtatatgcatatgtgtatatatttacacgtgtgtatatgcatatatgtatatatttacacctgtgtatatacatatatgtatatatttacacctgtgtttatacatatatatttacacatatgtgtgtatatatacatgtatatatttacacatgtgtgtatatatgtatatatttacacatatgtgtatatatacatatatgtatatattaacacatgtgtatatacacatatatgtatatatttacacgtgtatatatacatatacacatgtgtatatacacatatatgtatatattttcacgtgtatatatacatatatttacagatatgtgtatatatacatagtgtatatagagtatatatacatagtgtatatatactatatatgtatgtcaatacactatatatacactatacatgtgtaaatatatacatatgtgtatacacatacgtgtgtaaatatatacatgtgtatatacacatataggtgtgtatatacacatacgtgtgtaaatatacatgtgtatatacacatgcgtgtgtaaatatatacatatgtgtatatacacagatgtgtagatacataggtgtatatatacatatatgtatatatacacgtgtatatgtttatatatacacatagatgtgtaaatatatacatatttgtctatatacacgtgtaaatatatgcatgtgtatatacaatatatgtggaaatatatgcatgtgtatatacacatatatgtataaatatatgcacatgtgtatatacacatatatgtgtaaatatatacatatgtgtatatacacatgtgtaaatatatacatgtgtaaatatacatatgtgtaaatacacacatgtgtaaacatatacatgtgtatatacatgtgtatacacacgtgtaaatatatacatatgtgtacacacacgtgtaaatatatacatatatgtgtatacacacatgtatgtgtaaatatacacgtgtatacacgtgtgtatacatgtgtatacacacgtgtgtatacatatacgtgtgtatcacatgtgtgtaaatatatacacacgtgtatacacacatgtgtgtaaatatatacacacgtgtttacacacgtgtaaatatatacatatgtgtatgcacacgtgtgtaaatatatacactgtgtatatacacgtgtgtaaatatatacactgtatacacacgtgtgtatatagacacgggtatatacacgtgtgtaaatatatacacgtgtattatacacatgtgtgtaaatatatacacacgtgtatatacacgtgtgtaaatatatacacgtgtgtatacacgtgtgtaaatatatacacgtgtgtatatacacatatgtgtaaatatatacacgtgtgtatatacacatgtgtatacatatgtgtaaatatatacatatatgtgtatatacacatatatgtgggacacgaaacagtgtgtgaattccatgggcttcctttttgactcaagtatcccagagctgaagaagccaacgacctggaaacatcaatgggcataaaccaaaagaagtcccccaaagcctgctctctctagccaaattatcaggaaggcaccagacaagcaagataggcttttatttttatttaatttatttatttttgagatggagttttgctcttgtcacctaggctgacatgcaatggcaggatctcgctcactgcaacctccacctcctgggttcaagtgattctcctgccccagcctcctaagtagctgggattacaggcgcctgccaccatgcccagctaatttttgtattttagtagacatggggttgcaccatgttggccaggctggtctcaaactcctgacatcaggtgatccacccaccttggcctcccaaagtgctgggattacaggtgtgatccaccacacccggccaagacagatttttagataatgaatgttccactccaggcaaacatcacaggaaaatctgtggccacactcttagacacaccagcaaaagttaagtaggaaacatgggctttcactatcacaaagctctaatgaggagctccaatgcccaagggggctgctgtaagacaaggccaagtaaggaaccaggaactgtatcctcactggccagtaacaagcaccttcccccagtggcatcaatggagaccacatgaggcacctggacttctacctccaccggcagtaatgaggtgcccatccttctcccagatggggtggtgtctgaggaggattaatggagagtaaggacttgcaccaccattcagcaataatgagaccactactaccgcagtgccagtggaaaccacacaaggaaacaaaaatctcatctctacccatcagtaatgaagggctcccacccctagccccaatgtgtcagtggaggctcagtggggaacctggacatttatctttacctggcactcacacagtggtgtcccctcctcttcatctgccagagaagtgtcaaattaaaataggttttaaaaataaggttgaaataagatctagaatctcatatagaatatgaaaatgtgcaggtttcaacttttaaaaatcacttgtcacataaatagaaaacttttgaactgaataggaaaaaaagacaattactagatgccaaccccaaaatgacagatgtcagaatgatgtgacaaatattttaaagcagccacaatataatacatataaaccatggaatactatgcagccataaaaaggaatgaggtcatgtcctttgcaggaacatggataggagctggaggccattattcttaacaaactaatgcaggaacagaaaacaaaatactgcatgttctcacttataagtgggagctaaataatgagaacacatggacatgaagaggaaaacacagggacctacttgagggtggaaagtgggagaagggagaggatcagaaaaaattactattgggtactatgcttagtacatctgggtgacaaaatctgtataccaaacccctgtgacacgagtttacctatataacaaacctgtataagtatccctgaaattaaaataaaattttaaaaattaaaaaaaattagaacttgttgatcattatggtggacagaaggcaggactagattgcagctctgactcagacagacagagcagcatacagaggctcacatcgcacattttagctccagaatgactgcgagaacaaaccaggaatcccgagagaacccacagaccctctgaaggaagcggactgctcctgcaggactcaggagacaccccaaatactgtgagtgctcaaactgtggaagtgggaaagggagaccctccactcctgaacacacacccgcactggggaaaatgaaagtcatactcaagagaagtttccaaccttacctggagctgagtcaatttagagagccaagcaaaatacatgggtagaagaaacagtgggaaaggccctgggagctcactgggtccccaagcagccactcctgcctggaaccacagggaccctcctggaggcaccagaggcatgggggaagacgccacagggagaaggaagtctccagctggactttgtaacaatttgaaccgggtgagaagcctcctggccagaactcgggctagggggcgaatccggtgggcagactccacaggcggggaaagaatcaaagccctgttcttttgcagctgggaggcggggagcctgaggcaagttctcaagccctgctcacctcagccactgcctggaaacagacttgggactactgggggagcatggtgggagtgagaccagcccttcagattgcatgagctgggtgaggcctgtgactgctggctttctcccacttccctgacaacctgcatgactcagcagaggtagctataatactcctaggttcacaactccatcgacctgatggcttcacctccagcccccacagcagcagcagcaagactcccctaaggagagtctgagctcagacactcctagctccacccccacctgatggtccttccctatccacccaggtagctgaagacaaaggacacatactcttgggagttctagggccccgcccactgctggttcctctccatactaccacagctgatgctctctggaaagcgccacctactggcaggaagcgaaccagcacaaaaatagaacattaaaccaccaaagctaaagaaccctcacagagtccatttcaaccccctgccgcctcccacagctgagaggcccatagatggttcacatcacaggactctgtgcagacaacccccagtaccaacccagagccaggtaggcttgctgtgtggctagacccagagagagataccaatcactgcagctcagcttacaggaagccgtatctataggaaaagaagaagagtactacatcaaaggaacaccccatgggacaaaagaatctgaacaacagccttcatccctagattgtccctctgacagcctacccgaatgagaaggaaagaaaaccaactctggtaatatgaaaaaacaaggctctttaacacagcaagaagaaatccctgatttacctgaaaaagaattcagcaggttagttattaagctaatcaggggggcagcagaaaaaggcaaagccaatgcaaggaaatccaaaagatacaagaagtgaagggagaaatattcaaggaaatagattaatgaaaaaaaacaatcaaaatgtcaggaaacattggacacacttacagaaatgcaaaatgctctggaaagtctcagcaataaaattgaacaagtagaagaaagaaattcagagctcaaagacaaggtcttcgaattaacccaatccaataaatacacacacacacacacacacacacacacacacacacaaagaataagaaaatatgaacaaagcctccaagaagtctgggattatgttaaatgaccacatctaagaataatcagtgttcctgaggaagaagagaagtctaaaagtttggaaaatatatttgggggaataatcaaggaaaatttttccagccttgctagagacctagacatccaaatacaagaagcaaaaagaacacctgggaaattcatcacaaaaagatcatcgcctaggcacattgtcatcaagttagctaaagttaagatgaaggaaagaatcttaaaagctgtgagacaaaagcaccaggcaacctataaaggaaaacctatcagattaacagcagatttctcaggagaaaccttacaaactagatgggattggagccctattttcggcctcctcaaacaaaacaattatcaaccaagaattttgtatccagcaaaactaatcatcatatacgaaggaaagatacaatctttttcagacaaacaaatgctgaaagaatttgccagtaccaagccaccactgtaagaactgctaaaaggagcactaaatcttggaacaaatcctggaaacacatcaaaacagaacctctttaaagcataaatcacacaggacctacaaaacaaaatacagtttaaaaagcaaaaacaaaaaacaaaaaaaccatggtacataggcaacaaatagcacgatgaatgcaatggtacctcacatctcaatactaacattgactgtaaatggcctaaatgtcccacttcaaagataaagaactgcagaatggataagaactcaccaaccatctgctgccttcaggagactcatctaacacgtaaagactcacataagcttaaaggggtggaaaaaggcatttcatgcaagtggataccaaaagcaagcaggggtagccattcttatatcagacaaaacacactttaaagaaacagcagttaaaagagacaaagagggacattacataatggtaaaaggccttgtccaacaggaaaatatcacagtcctaaacatatatgcacctaacactggagctcacaaatttataaaacaattactaatagacctaaaaaatgagatagacagcaacacaataatagtgggggacttcaatactccactgacagcaggtcatcaagacagagagtctacaaagaaacaatggatttaaactataccttggaacaaatgaacttaacagatatatacagaacatttcttccaacaaccacagaatacacattctactcaacagcgcatggaactttctccaagatagactatatgataggtcataaaacaagcctcaataaattcaagaaaattgaaattatatgaagcactctctcaaatgacagtggaataaaactagaaatcaactccaaaaggaacccttgaaaccatgcaaatacatggaaattaaacagcctgctcctgaatgagcattgggtcaaaaacaaaatcaaggtggaaattaaaaacttcttctaactgaacaacaatagcagcacaacctatcaaaacctctgggatacagtaaaggcaatgctaagaggaaagttcatagcccctaaagttcatacctacatcagaaagtctgaaagaacacaaactgacattctaaggtcccacctcaaggaattagagaaacaagaacaaaccaaacccaaacccagtagaagaaagaaaacaaccaagatcagagcagaactaaatgaaatcgaaacaaacaaacaaaaagtacaaaagataaatgaaacaaaaagctggttctttgaaaaaataaataaaattgatagaccattaccaagattaaccaagaaaagaagagagaaaatccaaataacctcattaagaaatgaaacgagagctattacaactgacaccactgaaatacaaaagataattcaaggctactatgaacacctttatgcacataaactagaaaacctagaagagatggaaaaattcctggaaaaatacaaccctcctagcttaaatcaggaagaattagataccctaaacagaccagtaacaagcagttggtaattcaaacattaccaacaaaaagaagtccaggaccagatggattcacagcagaattctaccagcattcaaagaagaattgggaccaattcttttgacactattccacaacatagagaaagagggaacccattctatgaagccagcatcaccctaataccaacaccaggaaaggatgtaagcaacaaagaaaactatagaccaatatctctgatgaacacagatgctaaaatccttaataaaatactagccaatagaatccaacaacatatcagaaagataatccaccatgatcaagtgggtttcataccagggatgcagggatggtttaacatacacacgtcaataaatgtgatatactgcataaacagaattaaaaacaaaaatcacacgatcatctcaatagatgcagaaaaagcatttgccaaaatccagcatcgctttatgattaaaactctcagcaaaactggcatacaagggacatacctcagtgtaataaaagccatctatgacaaacccacagccaacataatactgaatgggaaaaactgaaagcattccctccgagaactggaacaagaccaggatgcccattctcaccactcgtcttcaacatggtcctggaagtcctagccacagcaatcagacaagaggaaaaaataaagggcatccaaatcggtaaagaggaagtcaaactgtcactgtttgctgaccatatgatcgtttaccttgaaaaccctaaagactcctccagaaagctcctataactgataaaataattcagaaaagctttcagatacaagattaatgtacacacatcagtagttcttctatacaccaacagcaaccaagcagagaatcaaatcaagaatcaaaccaagcacagaatcaaatcaaccccttttacaatagctgcaacaaaaaaataaaataaaatacttacaaatatacctaagaaaggaggcgaaagacctctacaaggaaaactacaaaacactgctcaaagaaatcataagacgacacaaacaaatagaaacacatcccatgctcatggatgggtagaatcaatgaagaatcaatgggtagaatctgtgaagaatgatggtggtattttggtggggactgccaaaagcaatcttcaaattcaacacaacccccaccaaaataccaccatcattcttcacagaattagaaaaaaaccatcctaaaattcatatggaaccaaaaaagagtgtacatagccaaagcaagactaagcaaaaagaacaaatctggaggcatcacactacctgatttcaaactatactctaaggccataggtactggtataaaaataggcacatagaccaatggaacaaaatagagaacctggaaataaacccaaatacttacagccaactaatcttcaacaaagcaaacaaaaacataaagtggggaaaggatccccttttcaacaagtggtgctgagataattggttagccacatgtaagagaatgaaactggatcctcatctctcaccttatacaaaaatcaactcaagatgcattaagggcttaaatctaagacatgaaactaagtaagttctagaagataatgctggaaaaacccttgttgtagacattggcctaggccaggatttcatgaccaagaacccaaaagcaaatgcaataaaaagaaagataaatagttgggacttaattaaattaaagagcttttacacagcaaaaggaacagtcagcagagtaaacagacaacccacagagtgggagaaaatcttcacaatctatacatctgacaaaggactaatatccagaatctgtaataaactcaaacaaatcagtaagaaaaaaacaaacgatcccatcaaaaagtgggctaaaaacatgaatagacaattctcaaaagaaaatatacaaatggccaagaaacatatgaaaaaatgctcaacatcattaatgatcagggaaatgcaaattaaaaccataatgtgataccaccttactcctgcaagaatggccataataaaaaaatcaaaaaacagtagatgttggcgtggatgcagtgatcagaaaaacttctacactgttggtgggaatgtaaactagtacaaccactatggaaaacagcgtggagattccttgaagaactaaaagtagaactaccatttgatccagcaatcctactactggatatctacccagaggaaaagtcgtcattatacaaaagagatacttgcacaagcatgtttacagcagcacaatttgcaattgcaaaatcttggaaccaacccaaatgcccatcaagcaatgagtaattaaagaaactgtggtacatatatacaatggaatactactcagccataaaaaggaataaattaacagcatttgcagtaacctggatgagactggagactatcattctaagtgaagtaactcaggaatggaaaaccaaatatcgtatgttctcactgctatatgggagctacgctatgaggacataaaggcatataagaatgatacagtggactttggggacttagaaggaagggtaggagaggtgagggataaaagactacaaataggatgcagtgtatactgcttgggtgatgggtacaacaaaatctcgcaaataaccactaaagaacatactcatgtaaccaaacaccacctgtactccaataacctatggggggaaaaggccaaataccagagaaaataaataaataataaaaattaaaattttaaaaatttaaaataaaataaaataaatttttcttctttcaaaaataaataataaagcagccacaataaaaatgcttcaacaagcaattacaagcctgcttgaaacaaacaaaatatagaaaatagaagatataacgaactaaatgaaaaattttaaaattcaaaaataaaataatggaaataaaagtctcagtggatgggttcaatagtaagaggaggaaacacaggaaagaaatcatgaattgagagaaaaaacaataaaaattagtcaatctgaaaaatacagagaaaatagactgaaataaaatgaacagtgtttcaacgacctgtgggactatttaaaaaataacattcatgtaatcaaagtttcagaaggagaggaaaaaggcagtaagactgaaaaagcactcaaagaagtaatggctgaaaatttcccaaatttgccaggagacaaagtcctgtaaattcaagaagctgggcaaactccaaacataatcaactgaaagaaatccatgccagcttctgaaaactaaatacaaattttaaaatattgaaagcagccagagaaaaatgacaacttacctatagaattaaaaaaaaacagatttttcatcagaaaccatgtagggcagaaagaagtggcatgatattttacagtgttgaaagaaaacaactgtccaccagccaacagtggctcatgcctgtaatcccagtactttgggaggctgaggtgggtggatcacttgaggtcaggagttcaagaccagcctggccaacatggtgaaaccctgtctctactaaaaatacaagaaaaaaattagccaggcatggtggtgcatgcctgtaatcccaactactcgggaggctgaggcaggagaatcccttgaacccaggaggcagaggttgcagttagccaaagtcacaccactgcactccagcctgggtgatacagcaagactccgtctcaaaaaatcaaaccagaacaaaacaactgccaaccaagaattctatgtccagtaaaaatatcttttaggaattattaatatacaaatattaagaaattaccagacgaaagaaaactaagataatttttcaccagcaaaactacccaaaaaaatgggtaaaggaagttctctaaacagaaacaaaataataaaaagagggacttgaaacattaggaagaaagaacacagtaagcaaaaactatgaacaaatacaacaggtttttcttttcttcttgagttttctaaattatgtttgaaggttgaagcaaaaatcacggcattgtcctatgtggttctaaatgtatgtacaggaaatatttaagacaactagtagaggaggatgacagaacaaaaaggaaggtaaggtttctatacttcacttgaactggtaaataacaacagtagactgcaataagtaatgtacatataatgtaatacctacagcacccaaacaattaagacatatactttttcagaactatatagaccaatcaaagtggaattctaaaatatattacagtaacacacaggaaggcaaaaaaaatgaaaacaacagaaaacaaaaaataaaatggtagacatacattctaaaataacaattatgtttaatgtaaatggtctaaaaacaaattaaaagacagagatggcatgttgggttgcaaaacatgacccaactatatgctgtctataacaaacttgcttcaaatataattatataaaaggactgaaagtgaaagaatggaaaaagacatatcatgcaaacattaatcaaaggaaagcaaggatggctacattaatatcagataaagtagacttcagagcaaagaaaattaccaaaaacaaggagggacattacataatgacaataggataaatcaactaaaaagacatagtaattctaaatgtgtatgcacccaaaaatacaactgcaaaatatgtgaaacaaaaactgatataactgaaaagacaaagagaaatccacaattataactggaggcttccataccctctcaacaactgatagaacaactaaacataaaatccgcaaggatacaggaaaactcaataccaccaaccaacaggttagcatttataaactattccaccccaccacagcagaatcaacagatttttcaagaatctgcaaatcatataccaagacagaacataaattgggaaataaaacaaacctcaacaaatttaaaagaactgaaattatacagaggaaaaagaaaagacacaaattaccaatatcaggagtaaaacagagactatcatatagactctacagatatcaaaggatgataagggagtactgcaagaaactctacacacacaaacttgacaactcagaagaaataatcaatacctcaaaagacacaaattaccatacatttcctattatgaaatagataatctggatagcctacaatattaaggaaatttaacttataattttaaaactcctaaaaaataaatctgtaggcccagactgtttcactggataatttgacctattttttaaataagaattagcatctattctacataatttcttccagaaaatagaggaggagaggtttcttaagtcattttttaatatcatactaacctgataccaaaaccagacaaagaatatttaaaaaagaaagaaaaccagacaatatccttcatgaacacagacacaaagtattagcaaatagaattcagcattatataaaatgaattctacaccatgtcccaatggaatttattccaggaatgcaaggctaattcaatatttaaaattcaatcaatataacctaccacattgcgctaatgcaaagaaatatggtcatatcaattgatacagaaaaagcttatgaaaaaattcaacagagattcttgataaaaactctccgagtaacaaattgaggggactttcctggagagaaaaggtagagttgttcctaaatttatttttgaaataaagggaaaagaaaaagaaatagaagaaacttccctcaacttgataaaggatatttacaaaaacctacagctagagttatacttcataggataaaagaatgaatgctttctccctaagatcaggtacaaggccagaatgttcattcacaccattcttcattctgcataatgctggaaggtctagccaatgcattagctagtgcaattttttacgaaaactaactcgaaatggaccataggcctaaatgcagaacacaaaatatccaaactgaaatgcagaaacaaaaaagaatgaaaaagacaggatattcaagaactgtgggacaattacaaaagatgtaacatgcatataatgggaatacaagaagaaagagagaaaggaacagaagaaatatttgaagcaacaatgactgagattttcccaaaatatcagctgatatttacccaacagactatacaccctttactatacctagtgttccctagtccagagcctctcaagagttctagaatgtaagtaccatctgtactcggttgctagggctaccataacaaagtaccacagactggatggattaaataataaaaatttattttctcacaattctggaggttagaagtccaagatcaaggtgccagtagcattggtttcttctaaaggcctctctccttggcttgcagatggctgtcttctccctgtgtcttcacatggtcttccctccctatgtgcctgtgtcctaatcgccttcatataaggacagcaatcatatcgtattagggcctaccctaatgacctcactttaacttgattacctctttaaagatcctatctccaaatgtagtcacattctgaggtactggggggtgggacttcagcatatgaatttgaggagaacataatttagcccataatactttcctcatgctccctcatgcaaatcctttctgtaactccctccaccttcatctttctaaaatgtattaatagtttttgtttcctaatgcagttccccttctttttgctgtttatgatttattcatttgtaattctttactattattttactagaatctgaggaaaggtaagaagaaaaaatgtggttaatccaccatcttttcctaggagtccccccaaactttttaagtatcacctcccactaagaagtcttcttgctgatgttaagaccacagtaatctctcctttatcctaattcttaattcatttaacacatatttgtcttgtttcctttttattagccttatgaccccacttacaggttttaagcaatgatggcttttaaaatttctgttttaccaccaatgcccagtattatattaaatattcattatttgattgataaaaataatttaatttttatgaatttataatatgaccccactcctacaattcagattcagtttttatgttttaatgtagtggaccaatgaatacatcatgaaattcacaatgcaccaccctattatacatgacagcttcttgggaataagaggtaaaaaatttcacatccaagtaccaaaatggaaagcacagagccatctcatgcctgaaaatcctgtcttagacttctcagaaacacaaacattttaaactcagcccaggcaaattagatcaaagctaataatgtagtcctttaaaaaatgacccattgctccaagctaagtaaaaagcatatcagatctatgaaaagtaattatacatgaaaatgagattctttgctttccttctaacaagtgttaaaggtaatgtaattaaaatcaacattgatcactatatttatggaaatcttagtcctgaattcaggtcatttacagttagttgagctgacctattaacaagatctttgaagtttctctaaggagcctcattgccttacacgattttccttgcttctgaatttccaccaggcttaggttcaaaatcctctggtggttaatgctgtcatgtggttggttggtgaaaactttgttctgcttctttgtcaaatacaaggacaaatcaagtgtaatgaaaagtgagatggcaaacatgcagtgtagcttgacttgataacatttcagattgtaagggctgatattcacctgagagactttatacccaatttgaacattttgactgacttactctgattatccaaatcaagcattctcggatggaaaaagtggtaaggtgagtaaaaaaggacaaaatcgaattccaggtacccactgcaacagacatgagaaaacaaaattaaagccaacatttggggaatcagaagcattctttttattcctgtgtttcctggattttctttttccattgggaagatcctcccattgttctaggaaacacagtttgttttggttaagcagatctaaggtaaatgcttactcactctttcaggtcagggaagtcctgaaagcagggagtaatccacatgcacaggcttcagactcagatgctgacccagtcttcaccaagtgcgtagtgaagctctgcagagactgttagaggatgagaactggttttcactttatctggcttaggccaactggtggagaattctgggcttaaggaggggcacttttgcaaagaagtacagccactggactccaggagcaggggtgcctggttttaaagttcatttgtgtcccataaggccccagtggtatcttcaagtatatggtaaagtattgttaaactgtgccttctagtatcagctgtgtttggaaggctaacggaagggactgcatccatgcctggtgttaagcaggcctggggtggagaggaagcctagaaacgaggctacaaccacagcagggaagcctgggcagctgcccacaggagagctgacagggaacagtatggctggatttgtgtgtgtgtgtaaacactccctaggtaggtgttgctgggacccaacaaagactgatatcttctagtgacacaagaaagaggctcaggttatgttttccagcatcaatgggacagatgaccctctaaagctagagcccttgaggatatcctgatggtagttacagaagttcatttgaatctggttctttatttttgcttctgcccttccagcaaattgcgggcttcagatggctttgctatttggtttgcggtgggagttaaaggcacatggtagctgccttgcaacatcctactgaaccctaccctccattaagctcaatctatcactgaggtaacaataaccagagccataagttatgattacctagtactgagtctactcaggaaaacctctatgtcaaatttatcagcctgggatctcagcctctccagccccaactaaggcaaaactctgagcctgtgggaggtaaaaagactatctatacctactttctttatgcttcatgtccccggttaaatcatcctttttcacttctgacttaacctaaaccctatcttggcttttgcctcccgaggcctgcttttagtttccttcaggatcctcctctccaaagcatgggactgataaaataaaatcgtctttgttaatggacaaattagctcatatgttactattttcaaattatagtaatacctgggctaagtttaaaatgtttgtgtctctaagaagtctaggacaggattttcaggcattctgacaagccaggagggaaacgtatttggcaggaaccctctggcactttgaggttgctggctagttcagggccagaggtgaggacattatgataaagtctgtaaccatgcagagcttccactactgccagactctatggataatactgccccaggtcttgaattgtaggatgttagggttaaaataaggttgatagcaactttattttattattttattttacattttacttttatttttttattttatttaatttaatttcatttttcattttgagacagagtctcgctctgccacccaggttaagagtgcagtggtgtgatctcagctcactgcaacctccacctcccaggctcaagagattctccttcctcagcctcccgagtagctgaaactacaggtgcgtgtcaccacacccagctaatttttgtgtatttcattgagacggggtttcactatgttggccaggctgcagtggtgtgatctcagctcactgcaacctctacctcccaggttcaagagattctccttcctcagcctcccgagtagatgaaactacaggtgcgtgtcaccacacccagctaatttttgtatatttagttgagatggggtttcactatgttggccaggctggtctcgaacttctgacctcaagtgatccacctgcctcagcctcccaaagtgctaggcttacagacgtgagccaccacacccagccaggtagcaacttcagctggaaaaaaacactgccatctcagtcaactctatttattgttggacagaattgtgagtgagtcctttcctttggtcttttcaccatcctcataaactaatacctgcccagtgagcaatacctcatcacagataattcaaagatgtttagcactcacaaaaggcttggtacaaagtgtagaaaagacataactgaacatggcataatctttgagaaatcaaatcaatgaccacaaaactatgacacttcttggtgtcaacttggctttttgccattgcaagtgtgctacttcatcataattcagggtctgtgttgacttaatagttaaatatagtttttctctgatgttacagaaatgcatattcaattatccaagtgagactaaacaaaatcactgtattttaccacttaaagaggcctcataaagtaaacatcaaaatgactcactgatgttagaaactgagaaggggaagtagaagaaaagcaggtatctctgtaggccagtaaagccgacctgaatattacacacaaacagcattgcccaccatgtccatgcacacacacacccccctctctcaaggaagaacagccctttctgcacattcctttctaaatgcatttttgtgacacctcctcttcaaaatttagtcaatatttagcttaaatctaggtctcatgcactgaagtactgaggggaggaaaaatgctgcccacacactcccccacaagtccctagaaagaccttgtgacacattaggaagggggctgtccttgatgtaggaagatgggagttctgacctagccatagttaggcactgactttgaggtatgctccctgtctggacactccaccatgattccacagcttccctacgtgaccgtggcccaggactgtcaggctacaggacagagtaaatccaatgtctcataacagggcccaaataagcactgacatcccttcctgtctgccaactactcaagccaaccaccacagtgactggcacagagaaggccaccaggacctgtatgctggctgaatgaacttgccgtaacaaactgtctgccgtactccctcctttcactatatcctcctcccaggtttcaatactgaacaacatgatcaaagattacatcttcatttttgctatatgcactagaaggagacttttacagatactaagcagtcaaaatctttttttgtttgagacagggtctcactctattgctcaggctggagtgcagtggtgcaatctcagctcactgcaacctctgcctcccaggctcaagtgattttcgtgcctcagccttcggagttgctgggaatacaggcatgcaccaccatgcccagctaattttctgtattttagtagtgatggggttttgccatgttgcccagattggtctcgaactcctgagctcaggcaatctgcccgccttggcctcccaaactgctaggattacaggcgtgagccaccgcgcctggccgaaaatcttaagaaattaaaattcactttcatttttattcctatcagaatgctttctgccacatgcatactgttattttctgaacatccagtaggtggtagtaataccgaagaaatgccagctgccagcctgccttctccagccgctgtgctcttgtgttatcctgacagtggctcagcaaccactgcagtgtacgaggaagaatatgagcgtctaagtcagactagcttctgcttgacccccagcttcacaggaaaacctattctgcatgtttctaggattgagataatatatgcaaaacccttggtaaagtgcctgccacacagtaggatgtatataaatattagctaatattagtctatttgaactgccatgaacaagggagttccacatgagaaacagaacattataaccctattcctttttacattcatttggtattcaaaaaacattttggggaggaacactctgaacacaatcctataaaagggaattaaaataatcctcattgatgatgaaaaggtctttaaatgttcagacaagtgctttcagccaaacttaaggcttcatctggatacttcattctcattctatactgcctgcattcgttcctttatctagcaaacatttattaacttcatattacgtgctaagtactgtactttggagatcaactctttaaaatacactgcacatttataatcccactgataggcagaccaattctagttttcatgtctcttagttcaggaggctattttaagaataccatacactgggtggcttaaacaagaaacatttatttctcacagttctggacactgataagtccatgatcaagaagccagcagacctggtgtttggtgagggccctcttcctggtttgcagatggctgttgtctcactgtatcctcacgtggcagaggacagagacagacagaaaaagagccagagagaacgggggtggggtgggggaagaagcagctctttcctgttcctttttaataagggtagtaatcccagcatgagggctccaccctcatggcccagttacctcccaaaggccccgtctccacataccatcacagtggggattaggatttcaacatatggattttgggtaggacacaacattcagtctgtagcaccactgaatccacactcaatggtttgcagtgctaggggtttactcagtaaagtccacatcattactggattccataagaggggacctgatagaggttactggaaacagcacagagtctgagttatgtcattattgacataactttgggcatgtaatttaaccttttcagctctttgttttcctatccaagtaacagctgctctaaatatctcactgaacacagttgcaagggtcaaataagataaactgaaaatgtcaagaagggtcaggcatggtggctcacccctgaaatcccagcactttgggaggctgaggcaggcagatcacctgaggtcagaagttcgagaccagcctggccaacatggtaaaaccccgtctctactaaaaatacaaaaaatagttgggcgtggtggtgcacacctgtaatcccagctactcaggaggctgagacaggaaaattgcttgaacccaggaggcagaggttgcagtgagctgagattgtgccactgcactccaggcctggcaatagagcaagactctgtctcaaaaaaaaaaaaaaaaaaaaaaaaaacaagtcaagaaaactatacagctcagagcactttgttgtgataaaagctcatcttctattgctcttactgggacagagttccagaagtattctaaatggtattgcaaattctgttctagtacaggatcgatggtatgacggagtcatctattttcgtgtatttccactactctggttacagaatggttttagttttccttttataatatcaaattaatttacaatcaaattaatttataacttttgcctggtgttcatggacaatgcatggccacaacagtctccagctttactcgcttttcattcagtgaacatttagcaagtgcctcctcagtgctctgcccggagcccactggtctccatcccgaggtggcagaaactaactgcagcgactcattcctcaaagagaaccagccaaggatcagaagaacgtttgatatatttcagtaacttgttagtagcggagaatattttatcattgatgacagttttatatgttttttaatatttcttatggcctatgctcaacccttattaatctgcttgtttcatcctgatttcatcggtttcatccacccaaaggatgcccctagttttataaaacattttcccccacgatcagcttcaggatcatcatgaatgtgttcactggcttgggtgatctgaaatgtcaataaagcaagctataagtggtaggttaaaatagaccccaggactcaggcatatcttcctcatttacactattctctgaagagatagtaaaccaatagaaagattctagtgaggcccaaatatttagttttacccatgtcaactgcctgagtgcctgcactctttatcttcttttcctctgacctctcacgttggtatttcgacagcatgaagtttaaatgctgaagtgtcacataaaatttaagaatctttaagagacaaaccaaataacaattctaccactgttctccatcccaagatctctcctgagtgaacaggtctgggctttgatgtgccattcaagaaaggtgccacagcaattcccatcctactattctgctatccatctgtatctctcagaagttaagatggatcctgttaagagaagccatcaaccctcctccacctaaaccagatctgacccatccttctaggcctcctcagaccccacctcttccatgccaccttccctgtctgttccccagaccaccacctccagaatcatcaaacccctgattgagcctttcatcactcacagtcttacttctttgcagttatcagcccagcaccagtactgcaaaagcacagtactgattccataagccacaagggaaatgtctcctacctcccatttgactggctgcttgtgatcacagaagtcaaacacactgaaggagggtcttctacttaggtacactacccacatacctggatcctgggataggcatccaggattgcagattccaggtgaacccaaggccaagccctctggaagcccctgcagtgttaaccacagcctcctccagagctgcattcagcaggacaccagagcagggcttcatacacacataaaccttgggtctgttattgttgtttggtgttttgtctattataaaatataaatggatattctaaatttgttttagtctatttgggctacagtaacaaattaccataaactgggtagcttataaataacaaaaatttatttctcaccattctagagaatgggaagtcaaacatcatggcagatttgatgtctagtgagggttaataatcttcttgctataacctcccatgggagaagggacaaggtagctctctggggcttcttttttttttaaataaggtcactaattccattcatgagcgctctgacctcatgacttaatcatctcccaaaggtcccacctcctactaccatcacacttgggattagttttcaactaatgtttagggagacacagacattaagaccatagcaaaaaaatatagtaggtgaacagcgtttattaaataaaattaccaagaggccttttttgcttaattcaaactctaattgtaagcatcagctaatggaggctcccagatccctgaggtgttcctactttaggagtggtcattttcagagatggaatgtaaggaattttgtctccttgctgctactaggttaaaattactgctatataaaatttaaagatgtcacaaatcttaaaagccttatcgctagacaggctgccattaagactaaattgaagtgaagctattcatcctcatgtttgatgggaaataagttttaaacttacataagctcaacaaaacaatcatgttaaaaacttttcaactaagtctttttgttgccccaaattattatttgacaaagtagaattaaactgattgggatagcctatatcatgtgtggcttcatttttcttctctttaagtgattacaatgaaaaagtcgtgaagagtataattctctcatgaattagatttgacagtcctacattaaataaccacagtaagaggagaaactcactaattctagcctaatgtcataataatctagactgatcactcaataaacagctgagcatctgccatagagaaggccaatgttagcactaatgacatctaagatgatgtcacgaccctccaggagcttaaaatctagttatgtgcacacatgaaaaattaacaaataaaaaacgaagggaaaatgtaccagtcaactcaaactctatcccccatgtcaccttccacagtatacagaactgcctacaccccaaggtcaagtcaaggtgctcatgactatgctattaatacatggccttcacctatgctgatcctgccacctggacatctccttccccctgtgcacctggaccatccttctcaagtctcatagcaaatgctgcctcttccttccctgtcccacccagtctgattcagagctgccctttgtgctctttccaaacctttattagggcactcatgacactgtgctgtaattgcagatttatttgactccccagctaccctgtgtgttactgaaggacagaagttatgtctgttttctgatgcttaatcccctactgggtacattatagacacttaagaagtgtttgaatgaatgaatgcccagaagtcctgtggattttcccacctacatatatttttaaaatccatcttgacggctgggcatgcctataatcccagcactttgggaggccaagacggggtggatcacttgaggtcaggagttcgagaccagcctggccaacattgtgaaaccccgtttctactaaaaatataaaaatcagctgggtgtggtggcgcatccctgtaatcccagctacttggaaggcagaggctggagaatcgcttgaacccaacaggctgaggctgcagtgagcaagatcgcaccattgtactccaggctgggtgacaggaagactctgtctcaaaaacaagaaataaaaatccatcctgtcttctttatacatccaaaagaataacatagaatggtggttgggcatgtggcttctgaaatcagactacttggtacagtagtcttactgctccaccacctgttaatcagatgtctatgggcaaactatataacctatatatgcctcagtttccttatctctaaaatgaaatccttgagtgattcttgatcactttcagaaaattggcctttttgtcacagcaaaggcctttcataatctggctcctacttcttcaccatctccccacagccaagccccaagtacctccactgcctgcaaatccctaaatgtttcctgttttcatactcctctgttccaagctgttctacctaaaccatgctttccctgcatctgcctggattattctttctaatccttcatgcctgagactagatggctcctctgcagagatgcctttctcaatcctaccagttgagctttgagtcctgcctcttagacttctatcattatatttgccaccctttattatagttcatgtttcttgtccaattcccctaatagactgagatacttcagggtagaggctgtggcttagcatagcagctggcacataatatgtgttgctgaattaagaattaaatccacaaatcagaaagcccttggtcaaacaagttgtcccaacatttaactcagaagatggccatcacaagaagtctcatgagcagtgaggtgtcctgcaggctgtgtgcacaggtgacataataagagcaatgctaaaggaagatttagctggcagaggcacacaggtggattatacaggaatacagccagagagactcagtaggggttactgccatcttcaggacatgaggtgacacatggcagacactgcaaggggaaagcccactggacttcatgagttagtgactggatgcaggcaaaaagaagtagcggtcaaaaatattgctaaggttgaaatttctgtctgaaccaacaatggccacattaaaagaggggcagtcaggagagacggctagaatggggctgctggattgcaagggcaatgagctgctatttacaatgttgggttctggtcagtaatagcacaccaaggaataacagttagtacagaaccagggaaaaagactagcacttgggaaaaaggacagcaattaagaaacaaatgtgggagttgttagtagaggttctgagtagtcaagctgtcaggggagaggagagggccaaggactagactagacacacaaagatgaaaaggaaacagagacagagctatgaggaggaggcaaggaaccaacagggtgaaatgtcaccaaggccaagatagccaaccaggtcaaatgctacagggggtcaaggacagtaagaactaaggggaaaatgactaattttaccatcacagaactactggggatagccagaagagagagaggacatggacagggtcaaaggaccattcctctaagcagggaaatccagacttgcttgtagtcaggggaggagcctcagaaaatagaggacatcaggatacaagataatagaaaagatagaagggcatgggctcaaggcccacactctaaaataacctcttcagtgctagctcttgtaattcatacctaaaatgaaaaatcgataccagacagatcaagccctaaaaaggcataagccttcagttgttcacaaatttgatagttgagatgtatagactgtgcatccaaaacctctggtgttgcaaaagaagagatgcttgctaaatactcataggcctcagggttatggactgagaaaacagctgatttaccctgaagttaacaaaggcttaagccccaggaactctcacttgtacaggccacttccaccctgagaggggctatagggaagtgtttacatgactatgtttttgcaaactacattttcaaactaaatttcaaaactaatatattttaaccacaatcaatctagactgctgtccctttctactctaacttccctgcacctagtgttttgagatctagactatgaagtagctgagtgttacagaatatatttacatggtctgcagtcatttttgtaccaggttgaattactgctcgccatctcagtataggaagattttagcgatactcctactactgtccatgccatcaacttttccagttttaggccagaagttgaaccatgatataaatgcattagacagtaaccagccccagaagtgcatgtgcagtggtggacaagatttgtaatgtatggatcccaaagctaatctgtggagatacttctcagtcttcagacatgtattgtaacaggatgcttcatggatgcctggtcaaaatgggagttctgccttaccagaaatatatactcatataaaccccagaatcatatggctcaaatacaaaagaaacacggtagagattttctcaaacttggcaacaatcctaaaaacttacatgacagaaccaataattagctatgaagacaaagcttttaaattatcaataacaaaaaacttaattccatcacgtgctttttgccaacgtcaccctctctgtgcccactctccctagtctgctttatgtgctccttttccaatctgttaaatgtggttgttagttctgttccacttacccagtcacccttttctcctgattctatacttccaagtaatctcatctaatcctgagacttcacctaaatgctttttaatgtccaaacccaaatcaccatccctaatctatttcaatgaccaaagggatcacaaatccaacagatcccaaattggacctttctctcagccactcaaccaaaccttccagttccacatatggtgtcacccgctgtggtttatattttagtgaatgaaagcactgccctaggggaaaaaaatctgggcatgaccattaatgcttccttctgcttctcaacttgcttcccagcccacacaggatcaccaaattgtacaagttaggaagcattcacattatgttccagggatgccattcacgcagaccacaatgtaaagggtgctccttggagttaagccctgaatgtgggggccctgaatctactgccaaatcttgcccattctacttcccaaatatttctccattctggtcacttctctccatcctcacggctagtactcttgttcaggataccataatctcttgccttaggtaccccaagtcctctgacaagttcccctgtctctaatgtccccaggcaactgttcttcccatagtagccaaagtaaattttataaaatacaaatttcagaatcaccctcctatataaactatcactagttccacagtaccctcaggatgaagttcaaatgtcctctagaatctcaacccttctgtcttcaccagcctcatttcttaccacaatccagttcccactctgtgctaaaaattaaacttaagttttctcaaacttgtcttgtcttttgcatctgctattcctggtatttcccatgatcccttagtattacctgtttagcatttattacgctgtacctctttatttgtatccccaccatcccattccacctcccacttcgttgtaagttttgtgaggaaagaatccatgtttactttgttcatttttgtattttcagtgcctagcagtgcctggcattatatgtagattcaacaaatatttgttaaattaattaaatgaatgaatcaaacaagtttcattaacattaaatttttaatgtttctttaaacataactctgataaaggtcaaacattaagaaagcattgtaaaaaggtaaaatgagccttggtactgtgttcagaaatgcctcctgttaacagagataatggatttagaggttggaagtaaaatttttttcaaatgcgttagcacaaattgttaaaatggtgaggacttggatatgccccatcaatttattaaattgagtgtaactaaaaccagagtcggaggcagccaataaatgacgggcatggtgcttctgccaacaattcaagaataattatgatgtaaatgttgctatcaagtcaaaagatacaattaacagtaaataactacatttccagaaagaaaccacttgggaaaatactgcttttatacctttaaggcaataatattactattattaataaaaatgactgagcactatgtgacaggcattaatgtgctaatacttataagtattagcctttctaaaaatctttgaggtaggcatttactaatattctattttatatgagaggaaacggaagcttagaggtgctaagcagtatgtccaaattcacaagctagttgagtgcaataggttgtatacgcaggttatttgacccaaaaatgactttattaaccactatgctattttgcaataaggcaacaatatgacagcccctaaagactgttctttattctaatcacttttaggaaatgttggtaattgtaataataatagtaacagtagcttactatacatccagccctgctccaaaaacaaaatgtgtgcattcattcaatctcacttatacccattctacagatttcaaaaacaaagaatagaaaagtaacttgtccaaggccctaaagccagatggagccagaattcaaactcaagaagtctgaatccagagcctctggtcttaaatcactacatgaaaatgtctctggggagaaatcaggctaacatcagaaattttttaaaattcaaattctatagtaaatcttgtgatctgtacttcttcagttaacagtctctacacaggtaacacaacataaaaactgcagctggaagtagttcaaatagctctacattaagagaagacagcacgttctgaactgttttggccaatttttagctctataatcatgcagagaacattaaccctctgagcctccttttcttatgttaagaatgacaataacattacctgccctgactaccttgtaagtttcttcaaaggatcataccgtagtccattcgggttgctataataaaatatcaaactgggtagcttacattaataaaaacagaaatttatttcttacagttctggaggatggggagtccaagatgaagatgccagtagattctggtctctggtgtctggtgaaggcccaccttcttgttcgtagatggtgccttcttatgtgtccttacatggtgtaattggtgaacaagctctctggggcctcttttacaagggcctgccctcttgacccaatcacttcccaaaggccccacctccgaagaccatcgccttcagggttaggatttcaacatatgaatttgtgggggatataaacattcagatcatagcagataaaaagctaaattcaattgcctgtttatatatcataatacatttagcaataaacaaagttaataaactctatcaagtgtattttaaagcattcaaactatccaaattacaaacatatctcaataatttataccacaatctgaagaaattatctttgtaaataaattatgattacttctcaaacaattcataagaatagtaatatgtataatggcaataaaaattaaccacaatatcgtataaaattgtaaactgaactgtcttattgatgctgataacaattaaaggatggtgtcctaatattttttaacaacttgatagtctctaaaattaactggttttaccagtgcttacaccatgcccaaaaatttgctaggctgctactttaaacatttacttaatatgattcttgcgtcaaattcaattaaattttataagtatcagttgagcacctaactatgtgcaaacgtctgtgctaggtactatgcagagtacagggatgagcagagttctagccctactttcaaaagtttacaaacgctacactcacatccaacaaatacatatgggctatatgctaattagtactttaaacattactaatttttacatttttacaccttgcattagattatctgtccttaactggtatgtaacatggatatcttaagggaaaaaaccctatggcattaaaatgtaagaatactgtgatacttcaattaacctagtttgaaagtctagttaaaagtcttctttctttcaacataaatactaaaaatacatacataccctgcaactaaataacttcatgttagtgaattggcacaataacatttaaaagttttataaagaaaggatctcactatctatttaacttcctctttacaaaggtaattattcatatgctaatgaagcagctttggcaagtggttacaaaaactcatgaaaatataaaaataatgttacatttatgggtcactgaagaatgtatctaaatttaacatttaaaatgactcataaaataaaatgctgatccttacaaatgtatctcattgtttatatttttattttcagaaaaacagagttcacttgaatacaattctcactagttaaatcacaattcaccttatagttaattaacttatgttcaaagatagtcctttcctgctatataatttcattttcttaaaaagcaaaacactttcagtagaaaaaatttacatatgaaagtcaaaaacaattatttcagcaaaaatggaaatcaaccaccgtatcttttcttgagttcttcgacagaactatccttcaatcctgacttgtctatgtgattaaataatgcacgtgcaactgaaaaagaaaaagaaattctccattttaatctcattttttaaaaaccaagcaaaatgtaaattaaaaggagcaatctatttgtcaaaaacattttacattttaaagcaatacataggtttataaattctaattcagatatttaaaaagccaatctgagaacacaaaattatatagcaatccaacaatggttctttcaggaatattttgctttagcagtataaaatttgccctgcattctcaatgatattaatcttgcagattaaacttaattcattctgtactaccttaaaaatgtttaccctatctgtgtaacaagtgtatttttatttacttaatatttttatttcaactaaactgtttttcaaacctaaatcattttattttaaaagaaaactttacatcactactgtaaatgaaaaacagcaat

SEQ ID NO: 242 - DNA, 31737 bp, Homo sapiens
gaattccagaggcaaagtgagtttggttactatgataggcaacagacctgagcaataatcagaaggttttgacctgtagatatttctggtggtgagatggatttgtataactgaaatagatgggagccaccaatattctatatgacctgtataaccaaaaatattctaggtatagtaaagccatcagaatataaagcatctattaattacaccttttaaacatatgtactctagtctcaatttctaataatctaccaaaggaaatcatatgcatatacaaattattttggcaaagggcatactatgtcaatgttgtgagaaaggtagatgtgctacataaacacagaaaagactgaaattctaggtagggagattaaagaagtttttgtgaataatttcattgtctgttcttgggtgaaatttgctgtccttccagttacctacatttttcacaattcataatgactccattttcttcaaaattatatgttccaccctcatttttaagctgcttctttgtctagtttagacatcatggcctatcattttaatcactatctagccaacgagactaaattttattgtatccttgctcatctttttggatctttttggatccctcttcaacttgtctactccgacacttgggttctggaaagtctcgtctacattaactgacccgtcatctctatgcaataattcatttaaatgatataacaattctgtctcatttttcacacagttagcttcctcctttcagaggctgcttctttctccacctctcactaacagaattaagaataagatgtccttccacccagttttttgaaaaagtcatgataaataaatgcacccaatgtcctgttcccccagttaaaaatatctacattcactttttgtggcttatttccttcattaatttattaaatggagataatacagttgcatagagttgctatgaagattgaataatctaaaatatgtgtcatgtgtcctgcatgtagttagctaatttagataatagctttctttccactttcccaaatttagttcaattacctgcgttctggattccattttctctgagccatatttgcctcttctatacctgtgagccatttgtttccaccctttctattgacttcacacaccaatatgagtcaattatgagtcaattctcacttgaagcaacacctcctatgaaataccatgcctacatttcctttccttcaaggttaatttttttgaaagtcttatttatgttgaagaatggtaatattcataaaaaactattttagttacccataatagggattaacaagaattaaactcagatggacagaaaactttttgagtatcttatccaaacagaaacaggaaatgatttcttggtatatgttgttctaagcaaattgtttaatagtaatataaagtgataattcagttccattcctctgtcataaatatgcaaaattcaggtaatagaattttcaaaagcccaatactgaagtcataagcaattactatattgtgctttttttggccaaaatagagggcaatggaattgggaataaagtatattgtaacattaaggcaaaattattgtaaattatgatgacatatacagtctggggtgtttttgtttttttgttcttctcattgacttcttagctctctttaacctggtgtcctgtaaaacaactcattaaatgcaatgggctctttggtatcttttttattcctaagttcagtggcctcttaatttcttaacttgctggtccttctagtgtttgaccttgctgaccatgttttccttgaaaaaaattcctccttggcttccccaccaggacacatttgtggtctctttctactcatctggcaaattcttagtccttcaatccccccatttttcctatctacctattcatggtttatcattccattcccacctcttcaccagattttaagatatactctgtttcctttaagtcttaccatagaaataacagaatattctactaaatgtatcaaagtcttgcattagtcaatacctttacctttttctcaggaaacatacacattttaaagcatcttacatccatctagccttttcttgaccttgtcatgttgtagtgaattttaattttatcttatttatttgaaaacctataagatgctgttagtattgctatacagggccaaccctcatttttattttcatcatttttacaattcatttttgttcattctctcttacatctcagatttttcatataaaaccattttacttctgaagtatattctttgatttggtgatgtaacctctttaaaataaatccaaaatgttcttattttctcttcattattgaaggaatttttcttagtatataattatgacaattattttattttaaattacaataaaggcattctactgcttcctgattctcaatattgcagtccagtcgactgccacttaacttctctgataaaccatattttcccctcacttctgactgcttttaggagcctctcttttattggtattattctgcttctctctgatgtggccagttgaagatttatttttttatttgctgtgcttaggatttgatggacctctggctgtttcaagagttttgaaagtctttcaatcttggtcttttcaaatattaaccttccccagattctctctcttccctttttctgagacatcaattagatacattttagaacctttcacttctttttctatgtcccttaacctcttacatgtttgcaatctttttttctgtgtaatacgttttggataattttttctattatatcctttcaattataattccttcctcagctttgtcaaaacagtgtttaaaccatcgtttgaattttaaatttgaatcattgcatcttccacacctattttggtacatcaggaggtaattttatagttaacttttagtttcttaatctctgcatatatctgtgcagattgtctatctagttaacatctacctatctatagctagctatctattcagtgtacttgataatttgcatctaataatcctaaaaactgtcatatctatacatttccttttatgtatgcttattctttttttttttttttttttttttttttgagatggagtcttgctctgtcttccaggctggagtgcagtggcacaatcttggctcactgcagcctccaactcctggtttccagcgattctcctgcctcagcctcccagatagctgggattacaggcacatgccactgtgtctggaattggttccttccggtgggttattggtctcgcttacttcaggaatgaagccgtggacccttgcggtgagtgttacagttcttaaagacagtgtgtccagagtttgttccttcagatgttcagatgtgtccagagtttgttccttctggtgggtttgtggtcttgctgacttcaggaatgaagccgcacaccttcgccgtgagtgttacagttcttaaaggtggcgcgtctggagttgtttgctcctcctggtgggttcgtggtctcactgatttcaggagtgaagccaaaaaccttcacagtgagtgttacagctcttaaaggtggtgcgtccggagttgtttgttcctcccttccggaattgtttgctcctcctggtggattcgtggtctcgctgacttcagcagtgaagccgcagtccctcttggtgagtgttacagctcataaaggtagtgcagactcaaagagtgagcagcagcaagagttattgtgaagagtgaaagaacaaaactttcacagcgtggaaggggaccccagcgggttgccgctgctggctggagtggccagcttttattcccttatttgtccccacccacgtcctgctgataggtccattttgcagacagctgattggtccattttacggagtgctgattggtccattttacagagtgctgattggtgcgtttacaatcctttagctagacacagagtgctgattggtgtgtttttacagagtgtggattggtgtgtttacaatcctttagctagacgcagagcactgatttgtgcctccctcacttgctgaactctagtcccaggttaaaaatgagatctctctccacaattctataattttaaataataatgtttttacaatgctttgacaatatacatcaacttttctaaaatacttcatcattttccaaatgacattgacactgagggcgtatattattctccattagtgatgttgaaaactatttgcatataaaatgattagagcaattaaacactttaacaatgtaatttttcttaaaaatatatctaaaaattaacctcctggtattttattattagagagtcacataaggaagaatgatttctgtacagatctttttcttttagcagcataattcattttcctgctctgaagcttccaatgtcttctgattacctaaaatattttagtttgggatttaattgcctccagaaactggctataatctaatttgagcctattttcctttgctccctacagacccatatgctcaactatctactgtttatcttcagtgaaatgtcccacaagcatttaaaattcaacatgtgcaaaatttaactttcttctccccgatttattcttcttcctattgttttgtctcagtggtttaaatcccctgattaaccagttatccaaaacaccctaaaataataatagcttacttgagaaccagggacattgttaacagtatatcatttgatttctaaaacgttatctgtgaatttctattattccaaatatatatgtaaggactgagacttggcaaggtaaagaaatttgtctcccagctagaaagtacagcaggtggaatttgattgaggtttgtctggcctgtaagcccctgttcataatgggtatgctgaactagaatctctgaatcactctttcctttatcttcacagaaacacgtcctgtcacattgttttttgatactttctttccaaatagcagtcagtaacactgtcagatggctcaaatgccagtctattcccctgtataatgcagggatctatgtgccaccagatagagatacaaagagagtcgctgactaaagactttctatgacctgtcaggcacaattatgtttctcaaaagtatttgagatgttcctacacccttattataaatatatttttatttggcttaatttgggtagtatttttgtttgtgtctttcaatttaataaattccaactgttcgaattacttattactatataataaactatctccaaacagaatgtctatagatgacaatttcttattattgaacctcacaattctttccttggaactttgagttccaagagtatagagtataaagagtataaagagtgtggtccatctctgtctcataaggtttgggacctcagttgggttgactcagaggctgatgccgggagcagctgggagccatcgcattagctgttctctcactattcattccctttgatctttattactttctttgtcttattttggattaattgagctttgtatggttccattttattttctttactgatttatcatttatgtcctagaatttacaatatacttctttaattaatcaggttctcccttcaaatatcatacatgtagcacggggatctcaaaatagtatattcccaatcgcttccgtccatgctttgtaccactgatatcatttgttttacttttacatgtactgtaaacacaaaccatattgctattattttttcttgcaactgtctgttatttttcagactattttacctaagaaataagaagttcttttatcttaattatactccagccctctacatttctttgagtgggtccaaaattctgtttgtattatatttattctcctttaagaaccttaatacagtttcttgtagtgtctgtttactagaaatgaattacttcagtttttttttctatatctgctttctttttggaagatattttttacagagtataaattatggattgacacatttatttttcagtacatcgaagatatcattctatggctcctaaatacaggatcaattatatagatgaaatttttctgttgtcattcaattttggatggatttaattcaggtcaacagatttactctatagtaacatttagttagtaagatctcatttatattggctttagggaggggggagggaaagcattaggagatatacctaatgtaactgacaagttaatgggtgcagcacaccaacatggcacatgtatacatatgtaacaaacctgcacgttgtgcacatgtaccctagaacttacagtataataaaaaaaactaagtatatacttcataggctttatgatgactgttacgtttataagcagtcactatgaaaattgcaatggtaattttatgttagtttatcaaacataaatcttgtttaattttatattttgttacctatactttgggggatcaagggaagagatggaactcttcctctgaaaatgcttcttggtacttaaagtagtaaaactataaaacaataaacatccagtattgagagatgatatgatagggcattatgaattcctgtgggtgtctaaattatgtatgtcagttgaacattgtagaagttatgtaaatcagcatagttatgtataacttaaccttgatttataaggtcttaactcagattatgactattcattgacatttcatgagaagctttagaaaactttctatttttaaacaccatttgtatgtagacttctgctgtcactgactttgggctttatattttcatagagtctttatggaaaaaatagaatttattttccacttttgtagctatagctgctgcacattttcacgctgatttatttttttgtttcttagctttgatgttttcaaaccaaggattgtgattttaggttagaatcacatactagaagcattaagactacgtctgtggatcagaatgctttagtgataaacctactttgaagacatactcttaagcaatctggatcttaaatttatgtgaatacttttttagaaaatgataaagaaaaatggaattacttcaaagtgtttcttgagtcgttgactcttttagtatctcaaatgttaattagaataattggaatcactttttagacttttcaacttaccttccttgggaagtttgtgcagtgttatagtttagtttagctctcttatagggtaatggtttgctagtttaaaactgtaaccaaaccaactgatcggacaacatttatccaaaatacttaaaatgttagaaagtttaggaatgttataacctaagtgtttttgctgataactttttgttatttatagatatttgtgtatttaacatacttacttctggaaatatatgcctttcctaaaacgtaaccatgcattcaataccatggcctatctatagaattgaatattttggaccacgttatctgtggcacagtcagttctgtgtttgaggtaaaagcagtaacggttagttttctactttgtcttgtagaaggtagaaaccatgtgtatgttatgtttgtctataaaagaaaaaatactaatattaaataagttcttatgactgagtcattcacttatttttccaataattcagattgtatgttcctagtgccattaggtatgtatgtatgtaacttttatagtttttcagctgaaagttgtattttttttatcaggactctttaatctcattttaatttcctttgaatgaactgtagttattttatttattcctatatttaccatctaaaccaactgtaatgacatgtacactaataaagaattgaacatttataaaaaaaagatagcattctatagtcttcaggctttcacagtttcatataagaattctactgtaattttaatctttgttcctctgtgtgtaatgtgacttttatatctgcttgatgtcagcattttcagtttgaattttaatttcatcagtttgaacatgatacgtctatgtatatggttctattttgttctgttttctttcatttgttttcatctcttttggtatttttcttattggtgttctataaatttttggatctgttgtttgttatgtgctattacttttaggaaatccttagtcatcattttttcattatttcaaaaaaaattcttctaccaaattctctcttttccttctgcattttacctatgtgtatgttatgttgctcggttttgtaccaatgtttgcggatgctctgttttatttttgtttcactctttcttcttttcgtgtttcagtttgggtaatttctactgacctgccttccagttcactgattatttccttgcctgtgttgagtgtactcatgaacacattaggagcactctttatctttcttactgtatttttgaacttctagaattttcatttgattatttttaattgcttccatctctctgctgaaattacccacttgatcttgcatgttgtctaccatctccactagagcctgaacacattagtcatagttattttcaatttcctctcacatagttccaacatctgtgctatatctgagtttggatctgatgactgttttgtttcatggctgtggcttttcatatatataatttagcctgggaatggtacatctttctatctgctaggccattagtgtagaggtttgaggctgtggtttctatagttaaaatcaatgcaacctttgtattcccatagtgaaacattatgtggagaatgaggactgacttgccatattaatatttgcttgccctcagctttagatgttcctttctaattgcaccccagagaggatctctttgtacactgtcattactgaagctcgtttgcttgtgggtggtgggtggtggtgaggggttccctgttctgattaagcctcaaccttagacaggcacaatatctttaaccctcatagatgtggccttctcagttatcctgcccctgggctgactgtgtgggcccagcctctctaggagttggtttttcctggtatttttatcagcagtactctacaggcaaaagtgtttgtttcctttcttcccatgggcttttttcagtcagaggagatgagaaaaaaggttcaagtagagtttcttgctcctcgttttggggtgctattcttctaccccaggtctgcatgaaatccaatactttcttcaggttctctcattttttctgtgattacatgggaggattcgtggagaaaaatcctgcaagaagatgagaacttccccactttctacaggtctcaagggttctgcactgcccttccagccttccctgagccttcaccaattcattgactattgtatctgaattctacttgttggtgcccagtggcatctgggaagcaagcacacagtatcctctttccctgcaggtgcctgcccctcgttagagtttggcccattggttgctctgcaacctcagttatctgaaagattacaaaagaatcatgaatttgaagttattccaactcgtttttgttataagggtgggagtgatattcttccctgctctttgcattctggaaaggatactagaagtccttaatgagatattttgcattagtttaaaaataataggtcttgtcttcaaaatctagtatgaattgtttacagcacatctcaatttggagtcaccatatttcaagtgcttaactgtcatgtgggattaatggctttcatatctgacaattcaacccaatgcgctcagctgctgaatatctcacacataatagtcataatatgcatattctttaagtctgtctgggctgccataacaaaaatatcacagactgggtggcttatcaacaagaaacatttatttctcatagttctggaggctaaaagtccaagatcagggcactggcagatttggtgtctgatcagggctatttctcatagatggcatctttttgctgagtcctcaagtgggtgaaagagacaagctcccttgtgtcttttataggggcactaatatttttaataaggacgatgccctcatgatctaatcacttcacaatgggctcatcttcaaataccataaccttcagtgtttggatttcaatatatgaatttgggggtatgccaacagtcagacaatagcacatatttcaaattaatattatctggcctccattctttgaggagttaaaagtttagagtttgatatttttggtgattttgtattattcatcttaataatgttaagtgcccatttgaaatgaacatagaatatgaagacaaatatattatcctaaatgtgtattttaccttcattatttgtttataaacctgaagatatcaggactgttactgtagatagttgaggtaaaaatttgttaagtttattcaaaagatcattttctagtgcatattgtagtacctatctttaatcctgagttgttatattaaagtcttgctttaatgtgatgtaaacattttcagtttctttatactaaaattcttcttattattcaacatcaaaataatgattttgcctttaaagcaccagaagcaagttgtaagatggtatgaatcaagtcattttcttgaatagcaacaccaaatagaaatcctttaacaaattcatcagttttgatttatgccagatgcatagatgtgaatttgaattcctaatgtagaattgaagcagaaatactgaggaggtctataatggcagcaaagtcagatgttttacagtttatttattttattaaattcattatttttccagataaagtatgttctttcagcccatttattaatgtgacatttaattgtggtcccaaaacctaaccagttataataaatctttgttcctctcacttcatgtactgtactgttttctgccttcatctgttttagtatgagacacactctgattgagagaaattgtttcaggaaatcagttgttctaaggttcttcctcaccacccctcccaacccccgcttaggtatgttctaaatgatgctggtggtcaataatgacatctttattatttttcatacttactatgataccataaagacaaaaacatgtatggttacttcataaataaccctaaatgcattagaatttaaaaatcaatgcttagattcttgagatagccatgaatcacagagaggtctacagtaagctggcagagaagggacacagcagcaggctataaagcatcataatgtttgtccataacaactacccaacctctgcccaccaaatagctcagttagcaggtcaattcatgtgaatttgcacgaaaggtttaggttgctagtctgtaataacagttagcatgcaatagattgtggctgtaggtttcacaattattctggttgtgactaagggttatacatttcttataagttttttcttgtgttttctaggcccagcatacaaatttgtgcatgactaaaccttgttggttacagtattttatagttttggtagaatggtgctggtttggagtgggcttaaagagacaatagaagtgggagaattggagaaaaactacaaataactctttgggggaattttgcttaaaatcaagcaaaacaatggaaaagcgctattggacaaaacaggatcaagagcgttcttttaatgagagaaaaagggcatatttgtacactaaggagaatggtgtgagagacagagggggaggaaagacagaaagagaagagaattgctggagaaattgagtgatggtgggatccggtgcacatatgcaagaactagcttgagacaggcttgtgtagtcaaaccacagtcagagcaggggacagtgtaagagggtgcagaggctggtaggtgcagtttgaggcatccagaacttttcttctgattgcttccgtttcttcagtgactctggaacaaggtctttatctgagagtgagaacggaggaggaagagcgttgaaaaaaagagaaggtatgaaatagacatttagaaaagaaagagagaagggataagggatagtgtcccaggcatttcgcaataaagccatattaaattgaacttcaagtcctgtacttatgaactcaaatccagtatctcatctccatttccactattgttaccctagctcaaactgccactctctcttgcctaaactcctaaactggcctcctattggcttacacatgtccactcatgctgctctccaatccattcttctcattgcagtgagggtcatcttttcaattgggtatgttcatgatcctgctccatttaaaactctaagcccatgcaagatacaagcaaccccttctatgacatcttcacctcaactctttgttcctccctcacacttagcagttctacagcaatggcttttttcactctcttaatgagcagtgtttcctcatctcatgtggcttcataaatgctgcctggaaaaatctttctctgtatcttatttctatttttcctttatatttcagttgaattgtcactttctcgaggaaaccttcactagtatctttaattaatttaatttccctgttaaattcttttatggtgccatgtactttttgcagttgtaattttattataaatttacttgtgagatcatttgattaaagaattttccctgctgaactggggagctctgagagagttaggactatgcttgcttttgcccaccagtgtattgctacatagtaagtaaatcatgtctggcacacaatggacctcaataaatatttgtcaaattaattttgactgagtaaatctcatgggtaccaattatcaaaattcactacctgtagaattctgagctacattctttataaaattcatttcatctttataaaaacttatacagtaaaaattattgtctaattttaaagatggagaaattgagacttagagatgtctctctaggtctttggagaactcttaagtaagttccccaaagttatccagctgatatttaagccagacaaatttgactccaaaagaacataccattaatcactctgaattgtgatttttaccaagttgctcatttactgcctgatttttgttcccctctttcagcttagataatgtatccgttcctttttagaatacttcaatttgcacaatatacctgattaacttaaaataatttgttttgtaggcacatgtttcaggactttatattatcaaaacaagtgctcattcttcttggccaaaataaatagcattccggttgtatatgtgtattagtccattttcacactgctgataaagacatacccgagactgggaagaaaaagaggcttaattagacttatagttctacatggctgaggaggcctcagaatcatggcgggaggtgaaagggacatcttacatggcagcagcaagagaaaatgaggacgatgcaaaagcggaaactcctgataaaaccatcagatctcacgagattcattcactaccatgagaacagtatgggggatccgcacccatgagtcaaattatctctcaccggtccctcccacaacacatgggaagtatgggagtacaattcaagatgagatttgggtggggtcacatggccaaaccatatcattctgctcctggcccctccaaatctcatgtcctcacatttcaaaaccaatcatgccttcctaacagtcccccaaagtcttaactaatttcagcattaacccaaaagtccacacacagtccaaagtctcatctgagacaaggcaagtcccttccacctatgagcctgtaaaatcaaaagcaagctagttacttcctagatataatgggggtacaggtattggataaatacagccatccaaatgggagaaattggccaaaacaaagtaattacagggcccttgcaagtctaaaatccagtggggcagtcgaattttaaagctccaaaatgatcttctttgacgccaggtctcacatccaagtcatgctgatgcaagaggtaggttcccatggtcttgggcagctccacccctgtggctttacagggtacagccaccctccaggctgctttcatgggctggcgtttagtgtctatggctttttcaggtgaatggtacaatctgtcggtggatctaccattctgggatttggaggacagtggcccttttctcacagctccactacgcagttccccagtagggactcagtatgggggcttcaaccccacatttccattctgcactgccgtaacagagattctctgtgagcgccccacccctgcagcaaacttctgcctgggcatccaggcatttccaggagtcaggagtcaggagtttgaggccagcctggccaacatggggaaaccccatctctactaaaaatataaaaaaattagccaggtgtggtggtgagtgcctgtaatcccagatactcaggaggttgaggcaggagaatcgcttgaacccagaacgtggaggttgcagtgatccgagattgggccactgggccactgcactgcagcccaggcaacagagtaagatcccatctcaaaaaaaaaaaaaaaaaaaaggcagaaaaggattaatgttttagataaaacaatagtaatgctaaagtttaaagttatataattctatagaacatctatgtttcatctccaaaataattttacagtacagattcattacaaacaaatgagattttcagctctcagtgtgcctgtgaactagttaaagcaagagaacattaaattacaggcttactaatttatattcttgattttacactgaccaaagcaataaaatccttccaggccactttactttgaaactaccaaccttaaggcatttttaaagtataaagagtcaatctctagtcattcaaagaactgcttgcttcccacaagcatgctattgtgagcagatcctccttttcttacacataagagtgcaacagggccacctgtggcgaagaactggagccaccactaattatctcaggcagaatcagtcagaaactttgtgacctaggctaatttcaccatcagtctttaaggcattatattttcggtagggtgaatggcaattaaactgtgtgaattcccattatggacatttatcagaactgaaaagtacaggggctgcaagtcattttaaattcatgagtgggggaagcagcagtgagcaggcacttgaccacattgagcttgtattagatccattttggggttaataaagccacagggatgttgtgttagccctaatcgtaggtcttggctgagtagtctcagtccgcatttcccaaacggttcattactcttacatagtcatttcctaaatgttcattgacttctctgccactcagaaagggcacacagaatcctctttcttttgctctcgcatgcgtactcacgaatttatgagaattttttgacaagccattgcttcagatttgaacaggaggcaccatgattcatgtaaaatgcagtatttcatcaaaggatgtgaaaaatgtttctggcaggacttctgatatcctgtgccagactgaccacaagtccctgccttggcatcgtagtgccaatataaaagccagggtaaaatattatctttcaaaatgtaaggctccagtgacctttagtacttttaccaacaaaagctattttcacagttataattcaagcatccagatttccccactgcttaatacacctgtagttgcaaagaagtcatttgggatgagtattggtcacttcaactcatataggtgctttttcgtttatggcagaccttctaaaacagaggatccaactctcaggagatctaaggcaaccaaaaagtgggttctttgtattcagaacatgtgttaaaaacgaaaaactctcatagtgaagccaaagcacattaatcctcctaatctgctttcagagtaatgaggcacaagcctttgtcgctggcatgctctgtctgccgtgctaacacagtcagtggtaatcacagccaccactcacaattaggaaggctaaaggcaaagaactagggtgagaggtgactacaccaccatcccggtcttcctgtaccctttccaattgtctcgtctggagttacccatgagctatttaagtgaagggttaggtgagttacttctgattcactgtaaagagcaaggaaagccatttgctcttgagcaaacatttccaacgcttatgtaaataacataatccatttaaaattatgtctaggaaaataatcatttagaaatgtgttgtcaggagaaatcatcgtaccatatctgcatgaataggatacataggtcactgtaggcaaaacagctcttcaacactactgtcattttgagtgcatgaagctaagaagaaaagtcttgtttaggtttattttttcccttaaacttttcagtttatcctcactcagttcttctccaataaatgggaattctctgtttagccagttttatttttgatttttgcttctgccatcacagtgcagtatggggtgttggaatcctgaagtattgttccgtaatgtctcttaccacagcttatttctcaaactgtactgggattttctgaaaatgttccagtaagtccagtattttatgataatttttacattttttattataaaaattttttaagtgtattataagcatatctggaatcattaagattgttttgtaacctaaaactaccagaaaatttatttgtatttatttatatcaaatgtggctgctctatgttaagactattaccacaatactttgtgcaaatgaaatgtttttaaaagttcaaatagatataagcaataaaataatttgtcctcactcattcttggtagtaaagacatgcccaattaaacaacaaacagaagacaacctgcattctggcagtcaggaccatattcacattatgtgagaatgtatttgggagatcccacatttgtagatagaagaaagactaaagcagttcattgataatacatgtttaagcaatgaaggcttattttgttcttgatttcaataattgctttatatactgttgacactcttggttacccaccagacatccatcactcctcctcttcctctttcatggcatgtgattatgttagccctctgtccgcctgcatggccctaccccagttcctatcccttgtccctttcttttctcttataatttagatactaggaaagtcttctggaagtcagggattataaactccatacttgcggttctgtgtaatacccaacatatatacattcacaaactacaaaaactgaaatggtacttctgaaacttaatctagtgcttcaccctatgcttcaaaaagatcagcaaatgatctagaaaataaacttgaatataactctaccaatttttagtaacatgctcatgcaaatagtcggtctttacatgaatattgttaaagggcaattcagaaactaatttaatataaaagtgaacttagttacatcattccactattaaaaccaactttaattttaaatttggcaaaataatatcatatcttagattaaattaatattattaatatgaatttccttggcatcattgtttgttcacagttaatttgtacattagttttggttttaaaattgaccaaaccccacatgcaaaatgtgtttaaacctgcttaacagactgtcaggcttcactgactatttagtctaatggataatttagactggagagagagagagagaaaaagagagggagagagagaataaaccacaatggttaatggcatagaatgcagaggaagaattctgtatttgaactttaacttcacccctcagaaaatttgtgacactgggaaaatatgaaactctccataaaaagaaaataataccagcacttccctagtttgtcattaggattagatcagttaatacatgtgaaggacttaaaatagtacttggcacatggtatgtgcaagaattacttttttctgttctcattactattctttattatttaattattttatcatatgcaataattgaagtggttatttactggagggaccagccttgagctgataattgtaaagcatccaagaaaaaaaattctgatgtccataattttatgtctaaggaagctaccttaagactggccattctgctatgattcctaggtactaaccaagtttgaattcggtgtataaagctaaacacagcccacataaacttaccttctgcataaatgtttttgctgagttaatttctggtgttttgcccttggctattacaaggagatgacattttaaatgaccatatttgtttgcaataaatgctaggttattcacgatctgttacttcctcccacacaccaagttcccagaaggcacaattcaaactcatttttcagaaaaattagaaacttgtatttgaatttatgaataattatgccagcttagctctagggacattatgctttggtttggttaccggaggatacacctcttacagctttgccttgcccagtgacttatactaccaactccagctttgttctgcatgttccctggacacttaaaagaaaatgatctgctgtatgggactggggctccaattagcatcttttttgcttaatttatactattttcttgacaggtgatcagcatgtagacttgtgtggcctatcaatggagaagacatttattattctctttgcccagttcttacccttgtttggataatcttcaaaatgtggcttccagatatgcagataaatgttaaaacactttgctaatgcttctgctgtctgtacaagaaccatgcctttataagaatattgaacaccagaaggacttggtccacaaggagaccccattgctgaggagctaatgtcttgaaagtgcattaaaagtctattttactaatcaccggggaaatggcaatcaaacccacaatgacatatcgtctcacatctgttaggatagctattattaaaaagacaaaagataacaaatattggtgagaatgtggagaaatgggaacccttgtacactggtgatagaaatggaaaacggtgcagccactatggcaaacagcatgacacttcctcaaaaaattaaaaacagagctaccatatcatccagcaatcccacttctgagtctttgtccaaaagatttgaaatcagtatctcgaagagatatttgtagagtatttctcccttatcttcagtttcactttccctggtttcagttacacacagtcaatggcagtctgaaaatgttgagtggaaaatttcagaaataaacaatttatgaggtttaaattgcagactattctgcctggtgtgatgaaatcatttaccatcctaccctgtcccacccaaaacatgaatttgcacatgccaaaaagaagcaatacagtgcttcctctaagtaaaaaggtgaaaattattgacttaatgaggaaagaaaaaaattcagatgctgagtttactaagatctataataagaacaaatcttctattagtgaaatttaaaggaggaaaaagaaatgtgtgcaagtacagttgacccttgaacaatgcaagggttagggttgccaacccctgtacagttgaaaatctgtgcataaacttttgactcccccaaaagttaactactaatagcctgctgtccatcagaaaccttacctataacataagacagttgattaacatgtattttgtttgttgtatttattatatactttatattacaataaagtaagctaaagaaaatattttattgagaaaatcataataaaaagaaaatatatttagtattcattaagtggaaatggatcatcaataaggtcttcatcctcatcttcttcatgttgaataggcagaggaggaggaagagaagggattgctcttactgtatcaggaggggcagaagtggaagaggtggaggagttggaagtgaaggcagaagaggcaggcacactcagtgtgacttcacggaaatacagcattgtttttgtctgagttttttgcctttttatttctctaaaaatatttctatatggtaccaacctttcttccaccatttgctttagtttcagtgcccatataatagaaaaacctatgttgtaaaagagtcaataacagccttgaaaatcagcacccttatgtcagattgtctaaagccaatttctttcttggcactgcttcttctacatcttctccttcctagtctggaactggctcagaatcactcatctccatcaagtcaccttttgctaattcctctggggtggtgtctattagtgctttaatttctccaagatccataagctgaaagccttcactcccaccttttttgtcatatccacaatctgtttcatgattcccttgattggctctgttgtgaatcttgtgaagttgtgcactacatctggacccagttttctccagcaggaatttgctgtttggtgcttggtgactttcacagctttttctaaacaacaatggcatcttcaatgatataatcctttcagattttgatgctctgtgtatcagggttttcttccatattattgacatttttttccgtaaagtactgtatgtaatgagccttaaatgttcttatgatctcctgatctagaggctgaattagagaggttgtttttggggacaagtaggtcattttgatatcctccatgttgaactcatggggttctgggtgggcagggccattgtccaatgtcagaagaactttaaaagtcagtcctttattggcaagatacttcatgacttcagggacaaagcaaggatggagccaacccagaaagtggcttcccctgtccaggctttcttactgtacaaccaaaatcctggcagctggtggttatttttttccttcaaggctcggaagttagcagctttataggtaaaggaagtctgatcataaacccaactgcatttgcacaaaactacaaatctctttctaccttaaatcctggtgcttgcatctcttacttactaataaatgtcctttgtggcattttttttccagagtagggcactttgatcttcattaaaaacctgtctaggcagatattctttctcctcaaatgactctcttaaaggtgcctgggaactcagttcctgcctcttagttggcagaagctgcttctcctgttatcttgacattttttaagttaaaccacattctaaaattatcaaaccatccattgctggccctaaattctccagctttagattcttcacctttcttttgctttaagttgtcatataatgactttgcttttctttgaatcatattagagtttgtagttatacctttcttgtagcaatcctgcacccacataaaagctgcattttcaataggagattaaaaggtattttgcaaaaagtgcgcggtttctatgcctcctggcatagctgcagcgacacattcatgaattttcttttctttttaacaatggtccttatgctaatcttgaaattgcaggcaactgcagctgcagaccccaatctaaggtacatataaagcaattcaactttctatagtaatgtcataatttttctttgtttcttggaaacacttccagcacttgttgtgggtctgatggtgttattaagggtctatgatattataatacactaaacatgatgaaaaatatacaagaaacttcagagatcaatttttagtgtgacacacaatttactggaaagacacacttcttacaagcagctgatcagtgtcacagggcatttcaagcatatacttgcaacaggagctcagctcaccacaacaacaagaacaggtggctgcaacattattacagtagtacagtgtgtgctacagttaattttatgcagttatgatttcattctgcatcttcacatatctgtcaactgcaaatggtaccaggtatggtctgtaagtgtttgtgtgggtaagttttgagaaattttaattttgtgtaatagatttatgtatattttatgatagtaaatgataaaatagactagtatctacatatattttatatattcatcaaataacttgttctcatttcttttgatatttctaggctacatgactcatttccaagttttttcaagtcattgcaacaatccaaaaaatttttcaatatgtttattgaaaaaatctgcatataagtgcacctgcccagttcaaacccatgctattcaagggttaactgtatatgtagagttcagtgctatccacaatttcaagcatccactgggagtctaggaatgtttctcccatgcataaagggaggctactgtaatcccatgtttatcccagtattactcacataaccaagatgtggaagcaatctaaatgttcatcagtgaatgaatgaataaagaatatgtggtaaatacatacaatggagtattattcaaccttaaaaagaaggacatcctgctctatgtgaccacatggaggaacctggaggatattacactaagtgaaataagccagtcacagtaggacaaatactgcatgactccaacttataaaaagggtcaaaaataatcaaactcttagaagcagagagtagaatggtggtttccagggcatgtggggaggaggaaataaaaaattactattcgaaactttgctattcataaatagttgtgctattcataaattttagttatccactgtcaataagttctagagatctggtgtacaacatcacttttatagttaataataatgtataatacacacaaaaatttgtgaaaagggtagatctcaggtttaatgctcttactacaattttacaaaagaaaaaattgaataaaaaacaatattgccaccaaaacatctatttcatttatattagaacagtagaatttcagttatgactaacgaatctacaatggcttaatgtcattataaattgtttaatagcagatatcttacttgacctgggacaaaatgctatagaaatattacaagtaccttcaaaattcaatgagaaaaaaaagttaagttttttctccaaattatttaaggttatggagtgtagtttgtactaactgtgacttcaaaaaaattaccttttccgctttcccacctatgaaaataacttttatttttatagtgatttattcatcacaatcttcataattcttcctaaaaatatctgacgttcattaaacattgatttattgaattaattgctggaaaaaatctagcatctacttttccattttgtttcaggatatttgatgtagagcatgactattcttagctcttaaagtcttagagttcgctttaatcatgaaattgcatttgagataaaataaaaaataagccagagaagttattgaaagtagtgtaaatatgacctataagaacagctacattcacctctatccttcaagagacacactggacaattttaatatttatattaaagccacaagggatttgaagtgatccatagaaatgtgtgaattttacaagacaagattaaataacttagggagttcggggtgaagggaactgctagtgaaaaaaatggaagtgaggggtaagagttacacatgaatattcatgacactgtgttctataaaatggctagaagttggactagagaatccttaaccctagttagagaagtaaaatggaatgtactataaaaccaaaatcctttcacaatgttcttttgcaataaaacatcagaaagataaagttatgtgtaagatttttaaaaatcattaatatttaaataaacagtaaagggactcacactatttgctaatctgcttgtaaaggttggtatagaagtagtgacatgaggatctagatagacgaaatggactactatgtactattcagctttctagctttcgtgcctaacattgctaagttagcctcagtgggtaactcaataaatactcattggatgaataaatgagtatagcaatcaattaattaatagacaaaattaaaaaagaaagatgactgggaaaaaatgtctaaaaaatttctacagtgtatttataactttcattttttacatgcagaaaattcaaactcatattaggttgtaaactcataagattagtgactattgtttactcatcatttatttttcctcctacccttaccctctaaaaacatagcagctgtcattttaaaaactcctactctatgtctggtgcttttcgtttatctcacttagtgtcttagctcaggctgccataacaaaatagcatatactggatgatttgaacaacagaaagttatttctcaccattccggaggctggaaacctaagatcacggttatagcatggttgggttttggtgagtctctcttcctggcttgcgaatggctgccctcttgctgtatactcacatggcctcttctgtgcaagtgtgtgttggggtaagggaaagctctctggtgtctcttcttataaaagcactaatcccaacaggagggcccaatgtcatgatttcatctaaccttaattacctctcaaaggccttttctccaagtaccattgcactggggattggggctttaatatacaaatttgggggtagcacacatatttagtctgtaacatctagtctttactagaccctgtgaagttagcagattgctgaagtaaatgggcatgaggttgaaattgtatatatttgttttatttatttgcttaagcagaatctgtaatttattagggtctgatatgatcagcccctagaaaacaaattcattctaaacatactctaggccgggtgcggtggctcacagggtaatcccagcattttgggaggccagggcaggcagatcacctcaggtcaggagttcgagaccagcctggccaacatggtgaaaccctatctcttctaaaaatacaaaaattagccagatgtggtgccacgtgcctgtaatctgagctacgcaggagactgagacaagaagatcacctgaacccaggaagttgcagtgagctgagattgcatcactgcactccagcctgggtgacagaacaagactccatctcaaaaaataaaaataataaataaacatatgctcaagcttgataaatattttaagcccaaatgctaatttattactctaacgttacaggaatcctgctagcagataatggttgacttgaaaacaaaaaatctccttggaatgaaaaataggaaactaaattttggtcagtagtgccaattaattaagttattccccaatgctttccatatagtgtggcctcattaattatttgtcaaatttctgctagaattatagaagaaatgagaaaattattcttttgttcttgtgtctgcattcaatttattgtgatatgttgtattagttgaggtatgtgaagaaaatacagccttaacacacatatgaaattagaaaagggaggaacatttcaatatactttttcagataattgtgaacataccttttgatagtacaccaaaactaaagaagtggtagtttctaaattaattttgatactcatctattcttaaagattggttgcaatgaagaaactgaaattacatctaaactttattttgttaatttgtgacattaaaatctcttgatctatcttgtacttttaaaattacataacaattgtacatatttatgaggcacagtgtaatattttgatatatgtaaacaatatgtaatgatcacatcaggataattaagataaccatcacctcaaacagttactgtttctctgtgttgggaacattcaaaatcctctcctatagctatttgaaaatatacggtaaattgttgttaactatagtcaccctactgtgctgtagaacactagaacttatagaacttattcctcctatgtagctttaatcttgtatttgttaactaacctctccctatgctgcccttccccctagtcttcctattctcacctttttttagcttttacatatgagtgagaacatgcagtatttacttactgtgcctggtttatttcacttaacataatgtcctccagcctcattcatcttgttgcaaacgacaggatttcattttttatggctcaatagtattccactgtgtatataggccacattttctttattcattcatctgtttatggacacttaggttgattccatattctggctattgtgaatagtgctgcaataagaatgggagtgctagtatctcttctccatactgacttattttcttttggatatatataaattactacaatcgtagatcatatggtagttctatttttagttttttgaaaaccctctgtattatttcccataatgactgtagtaatttccatcccactaacagtgtgtaagaattcacttttctctgtatccttactaacacttgttattttttgtcttttttataatagctattttaacttgggtgagacaatatctcattgtggttttgatttccatttccctgatgattagtgatgttgagcatttttctttatacttgttggccatttatatgtcttcttttgaaaagtgcctattgggatcatttgttcattttaaaaatggattattggatttttgctatcgagttgttagtttttttatattcttaatattaatcccttgtgtaatgaatagtttgcaaatgatttctcctattctgtagtttatctcttcactccgctgattgtttcctttgctatgcagaaactttttagtttgatataattccctttgtctattttgtttcctgtgctcttaaggtcctatgcctaaaattgttgcgcagaccaatgttctgaagcatttcctcaatgttttcttctagcagtttcatagtttcggatattacatttaagtctatcttaattgagttgatttttgtatgtttgtatatttttgtatattgtgacagtggtctagtttctcaaactaaaagtagaactatcatatgatccacaattatactgcttgatatatatccaaaaaagtggtctacttgtctaatttttgtatatggtgagagatagtggtttagtttcattcttctgcatataaatatccagtttacccagcagtatttattaaatacactgtcttttcccctatgtatgttctttgtggaaaatgagattgctgtaaatgtatggatttatttcttggttctctattctgttacattgatctgtttgtttttatgcaactgtcatgctgttttaatcaagtcaggtattgtgatgcttccagctgtattcttcttgctcaggattgtattgcttttcagggtcttttgtagttcaatataaattttaggaggtgtttaggagtgaagccatctggtcttgggattttctttgttgggagactttttattactgagtcagtttcattcctcattttcaatttgttcaggtttgctgtctctttcacattcaatcttgctaggtttaatgtgttcagtaatgtatctatttcctctaggtcttctatttttcttggtgtatagttattcatgtagtctctactgattttgtatttccgtggtatcagttgtaatgtctccttttccatttctgatattacttatttagatgttctctattttttcttagtctagctaatagtttatagattttgtttatcttttcataaccctaaaatttactcttttacctaagagttttttggtggagtccttaggtttttctgaatatgagagcacgttgtctacaaacagggacaatttgacttccttctttccaattttgctgtcctttatttatttctcttgcctaattgctctggctagaacttccagtactgtgtggaataaaagtggtgaaagtgagcatctttgtcctgcccgttccagttcttagaggaaaaagctttcaatgtttccctattcagtacaatgttagctgtgagtaagtcatatatggcctttgctatgttgaagtacattccttttttacctcatttttgagagtttttatcatgaagagatattgaattttattaagtatgaattctacatctgttgagatgatcatatgggttttgtccttcattctgttgatgtgctgcattgcatttatcagtttacttatgttgagtcattcttgcatccctgggataaattccacttgatcatagtgttcagtctttttggtgtgctgtttgattcggtctgctagcatttttttgagaatcgttgtatctatatttatcaagggtattggtctgtggttttcttttttgttgttgttgtgtccttgtcttgttttgatatcagggtaatgttggcctgtaaaatgagattgaaagaattcctttacctttaaatttttgaaatattttgaaaataataggtggtagttattctttaaacatttggtagaaatcagcagtgaaaacttgactagtcttgggcttttctttgttgggagactttttattgctgtcagtttcattcctcattttctgtttgttcaagttttctgtttctttcacattcaatcttgctaggttgaatgtgttcaggaatgtatcgatttcctctaggtcttctgtttttcttgatgtatagttattcatagtagtgtctactgattttatatttctgtggtatcagttgtaatgtctcctttttcatttctgatattacttatttagatgtcctctattttttcttagtctagctagtagtttgtagattttatcttttcataacacccccttttcattttgttgatcttttggtttttttagtctcaattttgtttattttagctctgatttctattacttatttcttctactaatttcgagtttgatttttttcttgctttcatagtatcttgatgtaaatcattgggttaattatttgaaatctttctatttcttcttgatgtaggtatttattgctctaaacattccaattaagactgcttttattgtacatcataggttttgctatgctgtgcttctgttttcatttgtttcaatatatttttaatttccttcataatttcttcattgaccttttggtcattcaggtcatttggcatattgtttaatttacatgtatttgtacagtttctgcaattatttcattaaataggttttctatctctttactcaactcttttccttttagaattttcatagtgctaatatttatttgcttaaaggtgccccatagttcctgtaggctttcttcattcattcatgttttttttttcttttctttttttttttttttttttttggtctgactgggttatttcaaaagacttgacttgcctttaaattcagagagtcttctgctgggtctagactgttgttgaggctctctattgtatttttggatttcattcgttaaatcctttagctccaagatttcaatttggttcctttttatatctatctctttgttgaatttctcactcagatcatgcatcacttttctaattttgtcaaattgtatatttataatctcttgtaactcactgagtttccttaagatcataattttgaaattttttaggcatttcatagattttgtttcctttaagctccgctactagagaattattgtgttcctttggggatatcatgcttcttgcttggtcacgtttcttgtgtctctttgttgatatcagtgcatctggtggagtggttgcctctttcaattttatggagtagatattattaaaaaaatgagttttctttctatagatgtgccctatagtttcagtgcagggtactttgactttggttctgggtgggtgcaatagcgtagttttcctgtgatttctttggctgtaatcagcatcagcagtgtcagaaagtgcctcagtggcctagattgtgggtgtttgtggaggcagtggtgtagctttgctaaggaccagggtcactacataggctgattgtcaggctctgtggggatatacacaaggcacagttgctccgttggtcagtcggcaaaggttgtcagtggtattgggtgccagtcaagacagtcctcaggttccaagatgcatgtgtggggtgtggcagctcaacttaccttgcgttttggaaagatcttatacttccgtatgattttgcaatcccacgtattggtcattgaaaaatatcaatttactgagtgatacagatatttttaatgttgacacatttcattatacagagttctgtgtctttcagcacactttgtttaaactctcagtttcacttttgtcatttgaatatggaggctgaggaatccaaagatctactgttgacaagctgaagacccaggagaactgataatatacttccagtctaagtttgagtccaaagacaggatgaaataagaaaataatacataaataataaataaaatgtaataaaataaaatataataaaaaataataaataaataaataaataataaaatcagcttagaagctgattgctgccatgaagtttcctgaaatatgtaaccttgactttgtggccaggtagcagacagttacaaaactattccagacatctgtgtacttattattatttcacagatgccacactattcaaagaatttccgttttgattatgccttaatttccagagagttattgctattaaaagtgatatattatttttaattacattttctaatcagttattggggatataaagagatatcattatttttctttttttaacttttactttaagttcaggggtgcaggtgcaggtttgttacataggtaaatttctgtcgggggggttgttgtacagatgattttatcacccaagtattaagcatagtacccattagttgtttttcttgatcctctccctcctcccattctccatcctccgaaaggccccagtgtgtgttgttcccctatgtgtaaatgcattctcatcatttagctaccacttgtaagtaagaacatacaagagctaccattattttcatccacaaatgtagtatatcgattttatcattttgtataatttgctgattatcttttttaatgtaaatgtttccatcattacaagtaataattgatttatcctttcacttctaattcttctaggtcatttaatttcctggccagttctgttaaatagtagaagtgataatgcacatcgtaatttgtttcttaccttaaaataaatgtatataacattgaacacagatggatataaacatgggaccagtagatactctggaccactagaagtaggggagagaggtagtggggaggggggtgaaaagctacctattgggtgctatgctccctacctgggtgcaatacacccatgtaacaaacctgcacatgtacccccataatcaaaaataaaagctgaaattttaaaaaaagaaatgaaactataaaaacaatcgatattattaaattatatttaaatttagaaatgtaaattaaatacattcttcaccatgaaaaaacaaaaataaatgtatttgtaaatttctggtaaagcttttgtcagcacaagaacatttttatgtattcttagttttctgatttttaaattattttattagccttgttttactcaataaacagtaccaaagtataattacaattaatgccattaataacagaaacgagactaatatgaatgcgataagagctgagtgagtgaaggtcaggaagagtggcagttgaggggtcaaggcaaga

SEQ ID NO: 243 - DNA, 31737 bp, Homo sapiens
gaattcacttgagtcgtatgcattcaacaagaaagcaactgtctaagatgagaaacttcaaggcaagattaatgatgaagacaaacagaagattctggacaagtgtaataaaactatcagctggctcgataaaaatcagactgttgagaaggaagaatttgaacatcagcaggaagagctggagaaagtctgcaactccatcattaccaagtataccagactgcaggaggcgtgccaggaagaatgcctgggggattccctgatggtggagctcctccctctgatggtgcttcctcagggcccaccattgaagaggttgattaagccaacccaactatagatgtagcattgttccacacattttgaaacactgaaggacctaaatttgtagcaaattctgtggcagtttaaaaaagttcagctaatatagtaagtaactgggtagtctcaatacttgaatatggaacatatgcacaggggaaggaaataacattgcactttataaatactgtattttaactggaaaatatagtgtcttaaataaaaactgtcttaaattggcaccataaaaaaacgtaaaatccttctagacattgacttaggcaaagacttcatgaccgagaacccaaaagcaaatgcaacaaaaacaaagataaataggcgggacttaattaaactaaaaagcttcggcacagcaaaagaatcagcagagttaacagacaacttacagagtgggagaaaattttcacaatctctacatgtgacaaaagactaatatccagaatctacaaagaaatcagcaagaacaatacaaataatcccatcaaaaagtgggctaaggagatgaattctcaaaaaaagatatacaaatggccaaaaagcacatggaagaatgctcagcatcactaattattagggaaatagagatcaaaaccgcaatgcaataccaccccactcctgcaagaatggccataataaaaaaatcaaaaaataatatatgttggcaaggatgtggtgaaatgggaacacttttacactgctggtgggaatgtaaactagtacaaccaggatggaaaacaacgtggagattccttaaaaaactaaaagtagatctatcatttgatccagcaatccgactactgggtatctacccagaggaaaagaagtcattatacgaaaaagatacttgcgcatgcatgtttatagcagcacaatttgcaattgcagaaaaaaatgtcccatcaaccaacgcatggataaagaaaatgtggtacatatataccatggaatactacctcagacataacaaggaatgaaataatggcatttgcagcaatctgaatggaattggagactattattctaagtaaaataactcgggaatggacaaccaaacatcgtatgttctcactcataagtgggagctaagctatgagaacacaaaggaataagaatgatacaatggactttgggaacttcagggaaagggtgggagggggatgagggataaatgactacacattgggtacagtgtacactacttgtgtgatgggtgcaccaaaatctcagaaatcaccactgaagaatttattcatgtaaccaaacaccacctgttccccaaaaacgtattaaataaaaaataaatcttaaaaaacatggtacatatacacaatggagtattattaagcaaaaaaaaaaaaaaaaatcagatctagtcctttgcaacaacatgaatacatgaatggaactggagatcattgtgtttaatgaaataagccaggcacagagagataaatgtcacatgttctcacttatttgtgagatctaaaaatcaaaacaattgaatccatggagatagagagtagaaggatggtttccggagactggaagggtcactgagggatgtgtgttggggggaggtgaggattgttaatggatacaaaaaataattagaagcaatgaacgagacctactatttgatgccataacagggtggctatagtcaataataatttaattgtacattttaaaataatttaaagggtgtaattggattgtttgtgattcaaaggataaatgcttgaggggatagatgccccattctctatgctgtgattatttcacattgcatgcctgtatcaaaccccatctcatgtacctcataaatatgtatacctactatgtacccacaaaaattaaaacaaaaagaaagaaaaagaaaaagaaaagtaaatgaaatagattacaaggcaaaagtaacaacaatagcatggttgagtttaaaagagacacatagtccagtggaacagagtatagaacagagaaataaatccatgtatttacagccaactggttttccacaaaggctccaagaacatacactgggtgttggacattattttcaatgaatggtgctgggaaaactggatatctacatgcaaaagtatgaaactggacccctatttctcaccatatacaaaaataaactgaagatgaattatgaacttatacataagacctgaaactataaaactattagataaaaacacacagaaaacacttcagaacattaggcaaatattttatggctaagacatcaaaaacacacacaatgaaaatgaaaacaaaaacaaaagcagacaaatgggaaaatattattaaataaaaaaacttctacatggcaaaggaaacaatcaatggagcaaagaaacaacttgttgaatggaagaaaatatttgcaaactattcatctgataaagaactaacatccaaaatatactcaaatagtaaaaagcaatcacattaaaaagtgtgcaaaggacatacatagacatttctcaaaagaagaaatgcaaatggctaacaggttttttttttttaatgctcaacattaccagtcacaagggaaatataagtcaaaaccagaatgagatatcatcttaccccagttagaatgactgttattaaaaggaaaacacaagagacgttggcaagaatgtggagaaaagaaaacttatatactgttggtggcaatgtaagtcagtacagccactatggaaaacagtatggagatgtcaccaaaaaaacccaaaaacaaacaaacaaacaaacaaaactaactaaaaataggactaccataccatctagcaatcccactactgggtatttatcaaaagaaaaggaaatccatatatcaaagggatgcctacatttgcatgtttatagcaacagtatttacaatagcaaagatatgagatcaaccaaattgtccatcagtgaatgaaaatgtagggtatgtgcacaataaagtactattatgcctttaaaaaaactgaaattttgttatttgcagcaacacagatgtaaatggatgtcattatgttaagtgatgtatgccaggcacagaaggacaaatattgaatagtttcacttacatatgggagcaaaaaaagttgatctcacggagatagagagaagaatgatagctaccagagactgagaagtgtgcgtagatggttgttgatggaagaagagaggttgttaatgggtacaaacatacagttagatataagaaatgttttaatatttgatagcagagtaactgactatatataacaatgtattgtatatttcaaaatagctttgagagagaactgaaaggtttccaacacatacaaataataaacaggctggacactctagctcattcctgtaatcccagcactttgggaggtcaagggagtaggatatttgaggccaggattttgagactagcctgagcaagagtgatatcccatctctacaagaataataataataattagccaggtgtggtggtatgtgcctgcagtcccagttacttaggaggctgaggtgggaaaatttcttcagcccaggaggtcgagactgcagtgagccatgattactccactgcactccagcctgggtgacagagtgaaaccctatctccaaaaatttttttgtaaaattacaaataaaaatttgagttgatgaataccctatacatcaacttgatcatgacacattatatgcatataacaaaatattatacatatgccataaatatgtacacatattatgtatcaacataaaaaatataaaaaataaactggcatcacagctatgaaaataaattgaattgttaaatggcagttgatacagacttcaggtaaaatgataactaagctacatggctgaataaaatgtttagaatgcaactgagaaagcagagagatctaaaatatatgaaagagattaggagatacaaataataaaatgagcaggtctaatttaaatcatgttgaaaattcagaagtagaaaagagggaaaacaaagatacaatatttgaaataaagactttgaattttatagaaatgataaagtgagatcaggagggatggctcatacctataatccaacactttgagaggccaaggcaggaggattgcaggaggattccttgagcccaaggagtttgagaccagcctcggcaacacagcgagaccctgtctctacaaaaaaaattttttaaattagccaggtgtggtggcgtgtgcctgtaatcccagctattcaaaggctgaggtgggaggatcatttgagcccaggaggtcgagggaacagtgagccatgattgtgccattgcaccccaggctgagggacagagagaaaccctgtctcaaaaaaatatatagaaataagtaaaaataaaaacataacaaaattgggaaatgcagatacatgtgggagatcaaaaaagtgtgataaataaaacgggatatttatatacaaacaagaatagtgtggccgggcgcaatggctcacgcctgtaatcccagcactttgggaggccgaggtgggcggatcacgaggtcaagagattgagaccatcctggctaacatagtgaaaccccgtctctactaaaaatacaaacaattagcccagtgtggtggcaggcgcctggtgggaaccagggtggcgggcgcctggtgggaagggcgcctcgtgggaacccgggggggcggagcttgcagtgagccgagatggcgccactgcactccagcctgggtgacagagcgaggctccgtctcaaaaaaataaaaagaaagaaagcaaagaaacaaaaatcctgtagacatatgactgatgtgcacaatttactcaattgcatttgctaatcatattaatcatattacaaagatcgttatgattgatataacacagggttagtaataaccttgaatgaatgtattcagagaaataccctatgcaacatgtaaaactatttgggggactatcaaatgcatttctagttgtaaattttcatcacttttgataaaccttaattattctcctccaaagagtctgaacaatcttgaatatttgttatcagcataggttaagactaaaggactaattatggcatagttattgaccacaggcatatggaatcataccagtagagggtcgtttatccatgtcacaaccactgaaaatgagaatatgaagtccacccaatataagaagacaaaacagctcaccaacaataggatggtctgggaggccctttttgctggggaggctcttggggagacgctggtgctatgtaggtgctgggacagtctcttttgtttgtacaaaataatcacccatagccacttgagaggaccatgagtcctatgaagatgacatccctcaaaaccattagtatgaaaaacaggctcctgtgggtgtagctcatgggcaaaacataacagtgctcagtgacaaacaaaagactggccccaatcctattcggggtaggcacaatgaaaagcaaaaggttattagtaatgaacatgttgaggacccatgagaagaggatgaagcctaaggtgtgatttgcagaaatatgtttaaacttttccaagaaggaggtgctggggctgatggtgatggcctggagcacgcttaggaggcaagtggtgcagatggagactcccctcatcaccctgtttaaaaatgtgatgatcttacactttagatcattgttctgaatattccatgattcaaataagtcggaggacaccagtatcgcctgagtgaagagtagcagtatgtggattaggggcaagtgactaatggtcatgtcaatgggcttaagcctgtgagtataagcaaaagtgaagatgtggaaaagaaggaggaaggtgtttgctgagattccaaagctgacttgagggtaataaacatttttaatgacaatatagctgaaaagcttggtcatttccatggaaaattaaaacaaataaaggatatctgtagagaaaaataagacatcaaatgataattgcattaggaacatttctgccatgttgttaattagtatcattatgttcaataatctctgtgatctggaataaaaaatgtcgattaaatctgagtagtttattactctttgctaaatattcaacgcaaccatgtaattctccagatacttgctgtccgtctcccattcccacccctgtggttctccctctgttccctttcctgggctcccacaaaatctatgctttcctccatagcaacatttgccctcttgatggaaaactgatggtttctcttgtacatgtccacaagtacctcaagggcaggaaggagcttggatttctgctgtgcacaaactttttctacctatagatatctgtcaaacaaaatcaaagtatgtgttgggcaagtggaaaaagtaaattaactcaacaggaccatttcgatctttatctcgtcttctctggggctcctttcctggtgcacttggggatggagaaataaaatgactcaatgattttcactgaacagtaactattattgacagtggcagagcagcttcttacatatatcttggtacgtagcttacatagattctgcagaaaaataacaaaaccttaaggtctataaacagttaaaactctcacattcaaacatgggcacttattgtggtaaatgcagctttgaccccatgcatgatggtgaaaaccctggaagcatgccgggagagtggcaatgtgcaccaagggccttccttgactgactacgcagcccttgtttccacggaagaccatttagccggtgctgggcaccaagcctggtcctcagtcatgctcaatagtgggattcatagcatcatcacaactacctgggctctgctcctggtcacaagaaaaggaaggagaacaaagtaagggcagctgctcagcagaatcagaccaggcttgacagagttgactgtggtgggacatggtgtagcgtaaggaaatgacgatgtgtgcttctatatcctgggttgttaaatcagaacataatgcacctgtctaggaaccttgtaaagtgtaaaacataaaaactgcataaagcacttaaatcagtgtcaggcatacaaagacctaaaagtgaatcctgtcaatcataaaataatagctactttgtcataatcattttggcaaatatcatcatcatttttaaaacttagtttactgtctcatggaaaaaagtggatgtgtttgggtgataaaattatcactgtgagaagggggctttgttatgccaagaggacaactggtgatagtcatttcataagcaggaaaactggagagaatcataagaaatgcatgagccacatatgggaaatgcaaagacttgaaaatttgcgtataaaatatgcaaccacaatgagactacaaaaagtatcattaagaaactgtggtataggcacaagacagggatgccctctctcaccactcctattcaacatagtgttggaagttctggccagggcaatcaggcaggagaaagaaataaaaggtattcatttaggaaaagaggaagtcaaattgtccctgtttacagatgacatgattgtatatctagaaaaccccatcgtctcagcccaaaatctccttaagctgataagcaacttcagcaaagtctcaggatacaaaatcaatgtgcaaaaatcacaagcatccttatacaccaataacagacaaacagagagccaaatcatgagtgaactcccattcacaattgcttcaaagagaataaaatacctaggaatccaacttacaagggatgtgaaagacctcttcaaggagaactacaagccactgctcaatgaaataaaagaggacacaagcaaatggaagaacattccatgctcatggataggaagaatcaatatcgtgaaaatggccatatttcccaaggtaatttatagattcaatgccatccccatcaagctaccaatgactttcttcacagaattggaaaaaactactttaaagttcatatggaaccaaaaaagagcccgcatcgccaagtcaatcctaagccaaaagaacaaagctggaggcatcacgctacctgacttcaaactatgctacaaggctacagtaaccaaaacagcatggtactggtaccaaaacagagatatagactaatggaacagaacagagccctcagaaataataccacacatctacaactatctgatctttgacaaacctgacaaaaacaagaaatggggaaaggattccctatttaacaaatggtgctgggaaaactggctagccatatgtagaaagctgaaactggatcccttccttacaccttaaacaaaaatcaattcaagatggattaaagacttaaatgttagacctaaaaccataaaaatcctagaagaaaacctaggcaataccattcaggacataggcatgggcaaggacttcatgtctaaaacaccaaaagcaatggcaacaaaagccaaaattgacaaatgggatctaattaaactaaagagcttctgcacagcaaaagaaactaccatcagagtgaacaggcaacctacagaatgggagaaaatttttgcaatctactcatctgacaaagggctaatatccagaactaaaaagtactcaaacaaatttacaagaaaaaaaaaccccatcaaaaagtgggtgaaggatatgaacagacacttctcaaaagaagacatttatgcagccaacagacacatgaaaaaatgctcatcatcactggccattagagaaatgcaaatcaaaaccacaatgagatatcatcctacaccagttagaatggcaatcattaaaaagtcaggaaacaacaggtgctggaaaggatgtggagaaataggaacacttttacactgttggtgggactgtaaactagttcaaccattgtggaagacagtgtggcgattcctcagggatctagaactagaaataccatttgacccagccatcccattactgggtatatacccaaaggaatataaatcatgctgctataaagacacatgcacacatatgtttattgcagcactactcacaatagcaaagacttggatccaacccaaatgtccaacaatgatagactggattaagaaaatgtggcacatatacaccatggaacactatgcagccataaaaaaggatgagttcatgtcctttgtagggacatggatgaagctggaaaccatcattctcagcaaacaattgcaaggacaaaaagccaaacactgtatgttctcactcataggtgggaattgaacaacaagaacacttggacacaggaaggggaacatcacacactggggcctgttgtggggtggggggagtggggagggatagcattaggagatatacctaatgtaaatgatgagttaatgggtgcagcacaccaacatggcacatgtatacatatgtaacaaacctgcacgttgtgcacatgtaccctaaaacttaaagtataataaaaaatatatattaataaaatagaattatgacctctaaaaagaaagaaagaaaaaaaaagaaactgtggtataaatgaatgagaactgagtccccaaaccatggcccagactatcacttcttggcaatggaattagatagaagtttagtttgtagtaatatcctgttactagtgtctttacaatcccaagtcatttattaatatgttattgtagagaagaagcaggaaaacagacatagagaaaattgaaatagttctcctaaaaatggaatgcaactcgaatgggaagctgacacttcaatcttgcctatgttttcctgattgctacaaaaattacaatgagagcaaagtgtgtgaatttttttgtcaaaaagtttgcgaagtcttacctcctcactttgcttgtatctcgttagcaaaagggagtagaatatgctcaccttctggaagtcaggacaaagagtcagaaaggagtcagtagaagaaaaaaagcattttaaatctgtaatgcaggatgactcagagtcagactgtcctccttccttaatgggaaaagctggcacatgcctgagcataaaaagagaaagggatttttgactttgaatatgtttaagaatatctgaaaaatttctcagtaaaatccttaaatgcagatttttcttcaacttaggttttctgtttttttttaaaatttgattcttgggagacataaaagaaaaatatctgtaattttgacttggccttttatttaccttattcttggtcctgccccagttttcttcttttctgaaagcatattacagagagtatgatggaattacctaatcacaaactaccaggttgacatttgtggtaaatcatttaactttattttataaagaatattttattgattaaataaaaatttgagtttttagaagaagatacattataattctatcacaataaaatattttgaacaaaaggaaattttaaaaataattttaatttactcatccatttatcaagaaaataaagcaaaaccaacagtttatcactcattgtcttgtgactttaggtaattaaaagtaacactaaaaatatttcaataaaatttagagttgagatgtcacattgttttccagctaaatatgaattacttttctaactgtgaaatcaattaagtcactagggagaagatatctcaagttatatgaaagatacagtaagaagttggtcactaattacagtgatgaaaaaggtaaaatatggttactcgttaaaattatatttctcatgcagtttttgtttttttttttttttttctgagacaggattgtgctctgttgcttgggctggagaatagtggcatgatcatggctcactgcagccttgaccacctgggttccagcaatcctcccacctcagcttcctgagtagctgggactacaggtgtgcatcaccacacccaactaattttttagctttttatagagacgggggtctcactgtgttgcccaagctagtcttgaattcttgggctcaggcaatcctcccactttggtctcccaaagttctgggattacagatgtgagccactatgccgtaccatcccatgcatttttgaaaatactaatcactatgacatcacaaatggaaaataattctatcactttgttttcttctcacaacatccttagagcattttgaattgaataaagtgcccaatatttcaaagaatgtagtgagaaacaaatgagaaagaagacatagacctttattttgtggagaaataaacataagaaccattatgggattcatttggtataaatttattatgcagaagaaactataaattgagtattcaaaaataattgaatacattcacatttttagtctacctcacattcaggttttaaagtaacaggagtgtaaaaagatatcaataatataaataaataaaaatctagaatcatttctagaaaaattattgctgaagtgagcttttgtctaaagtctactattctttccaaaagcagagggggttaaaataacaaaaaccaaaaacaaataaagcctactgaatctaaattaactaaagtattagatattattagattctgagcattattataagttattctgtaccttaagagaaaatcctgcctcttgcatgtgcctgggtagaccctaaatagtcagtcactgaaattattgtcctagacctacatttctttcccgctgcctcactgtcgctctttctcagactgaaaaactaagcaacacttaccaagcagggttttgagagtgtgtttttccatgtgaggacagccacgctgctgttatataaaaagaatctcattacctcatctctccccctctccccggatgagcaattttcctattacctttgaaatacggcaatgtctggttgttttggtaagaagcagtctcaaaagggaaaaagaggtacttactttacttaccaagtaaagcaaagtaaatagcgacacctcctcagttgaacactttttaatgtcgtaatccacaatgtgtaaacctggggtgttcatgtgattatatcacactaagccaaactaaatccccacttccacttgacctagcatgtatatcagtgtcatgtaggataagctcgaacacattgagaactgaaaattggaatataaactaattactttttttgtttatttgtttggtttttcttgagatgcagtttcgctctcatcgcccaggctggagcgcagtggcgccatctcggctcaccacaacctccacctcccgggttcacgtgattctcctgcctcagccttcccgagtagctggatcacaggcaagcgcaaccatgcccggctaattttgtatttttttagtagagacggggtttctccatgttggtcaggctggtctcaactcccgacctgaggtgatccgcccgcctcggcctcccaaagtgctgggattgcaggcgtgagccaccgggcccggccaacttactacttttaacttgtctttctttactgaaatggtgaaggcaaggagacactagtagcaatgagcaggccatatattcagatttctgaaaaactattttattaagatttgactgacatatcaaaagttgtacatatttaagggtaagtatatgctacaaaaccataaccaccatcatggccataaacatatacatcacttcccaaagttaccttctacatcctttattattgctgttctttttgtttgcttggttggttttgtgttattttttatgaacatttaacataagatctaccctcttagcaaattgaaggtatacagtacagttttgttaactatagacaccaagttatatatcttgagaatttatttatcttgcataactataactttgtacaatttaaccattacttcttcatttcctcctccatccagcccttgacagccatcattctattctcaacttctgtgagtccattttagatccttcatatataggtgagattatgcagtatgtgtctttcccttacagccagattttgatttctaaatacctatttccatataagcctaaccatgattctttggtcttgagtaggaaatatataaaatgggcctttgtcaaaaagcaagaaagcactacaagatgagtgagatttcatcaaaaagatagacaagacagaatttaggggcttccaagggtaaattggggatgacatttttgttattgtttgtttgttttttttgagacagaatctcactctgttgccctggctggagtgcagtggtgccatcttggctcactgcaaccaccgcctcccaggtttgagtgattctcctgcctcagtctcccaagtagctgggattacaggtgtgcaccaccacgcccagctgatttttgtatttatttatttatttgtagagatggggtttcaccatgttgttcaggctggtctcaaactcctggtctcaagtgatcttcccaccttggcctcccaaagtgctggaattacaggcataaaccatcgtgcccagcccaatctggggacatttggacatcaaaataaatattgactagaattaatgcagctgagtgccatggtgcatgcctgtagtcccaggtacttgggaggctgaggcaggtggatcacttgagcccaaaaatttgaggccagcctgtgcatcatagcaaagcctagtcgaaaaaaagaactaatgctttccatatataaatgttcattatcccactctcagtgttacttaaaaaagagtatgaatattaatattgtgtgtgtaataacatagatgaaaagcaaatgtcaaactcaccctatataccagtcaatcttaaaaatgtccaatcaataatgctacccagtctccgaatacagtgtaagatttccctgggcaaggaggcaagcccaagaccattcttatttctggagtacctccttgcccatttctagtggctgagcaataattccacccaatttctgagccttgcccaactgcaagatccaaagagtaataccactcagcctggagccacagcctgagaccctcctttataaaggtgacagcagagcccagtccacagctcctcctgactgaagagcccagctactgatttcaccagacctcacagcccagccagaagctttagctgatctcagagcacaggccgcaacccagcccaaagagagaatgtgacagcaacctcctcctgtccatggtcactgccatttgagccatccagaacccaggttagaataaacagtaaaggactagtcccatgaaagaacacatgggaagactgggagatgtggccatggttttaaaatgacagacaccaacacaaggacacaaagattatgtagaatcagtaaaatatgacactaccaaaagaaactaataaaggtccaataatagattgtttaaaaattaagatctatgaactaagaatggaatcccttaaagaagttcactgagtgattaaaaaaaagagaaaagaaaactaaatggaattaggaaaatatgacacaaagaaaaggagaagattgaaaaaataaatagaaacaataaaacaaatagaaatcctagaaaggaagaataagatgacagaagtaaaaaattcaatagaaacctccaatagcagacttgattaaacaaaagaaataatccatgagcttgaagaaagaacatttgaatttatctaatgagagaatcaaaaagcaaaaagaataaaaatgaatgaagaaaacctacaggatctatagtatactatcaagagagctaatacttgcataataggagttcagaaggaaaagagaaagagagaaataaacaaaaagcttacttttaaaaattatgggccagacagggtggttcatgcctataatccaagcacttagggatgctgaggcatgaggaccatccaagatcagtagttccagagcagcctgggcaactccaaaaatatatttttaataaaaattttgataaatttatatcattataatatatattgttaaaaatttattaaaataataactatatattatattattttataagtaatgtaaattttaaataagatattctaataaatttaatttttgtcactacaaaaaataaattaaaaaaaaattttttaagatggttaaggccagatgcagaggctcatgcactttgggacactgaggtgggaggaatgcttgagcccaaaagttagagattggcataggcaatatagtgaaagccatctataaaaaaatttaaaaattagccagccatagtggtgcatgcctgtagtcccagctacttggggggctgaggtgggagaattgcttgagcccaggaggtcaaggcagcagtgacttatgattgtgccactgtactccagcctgggggacaaagcaaggcccttccttgaaaaaaaaaagaaattatggttaaaaatttctgaatatgggaaaagatatgagcatctaggcataagaatctcagtgatattcaattaaactcaagccaaagaatagctcacctagaagtattaagaaaaatctctcaaaatcaaagaaaaaaaggaaattctgatatcaccatgatgtaaaaaatatcacatacatgggagcccccagtgtagttatcaatgaatttttttaccatttttaatttttgtgggtacataataggtgtatatatttatggggaacataagatgttttgtacaggcatgcaatgcataataatcatatcatggagaatggagtagccatcctgtcaaaaatttatcctttgtgttacaaataatccaattatactattttagttagttttaaatgcacatttaaattattattgccgatagtcaccctgttgtgccatgtaagagtaggtcttattcattctttctaactattttttgtacccattatctacccctacttccctcccaacccctcactacccttcccagcttctgataaccatccttctactctctatcttcatgagtttaattgtcttcatttttagatcccacaaataagtgagaatgtacattgtctttctgtgcctggatcatttcacttaatataatgatctccagttccatccatgttgttgcaaaggacaagatcttattcttattctttttgaaatcatcattctcagtaaactatcgcaaggacaaaaaaccaaacaccgcgtgttctcactcataggcgggaattgaacaatgagaacacatggacacaggaaggggaacatcacactctggggactgttgtggggtgggcagagtggggagggatagcattaggagatatacctaatgctaaatgacgagttaatgggtgcagtatgccagcatggcacatgtatacatatgtaactaacctgcacattgtccacacgtactctaaaacttaaagtataataataaaaaaattttttaaaaaagatcttattctttttgatggctgaatagtgctccattgtgtatatgtaccacattttctttatccattcatctgttgatggacatttaggttgcttccaaatcttgactattgttaaagggctgcaacaaacatgggactgaagatatccctttgatatctgacttcctttcagtgggacggctggatcacatgttagctcagtttgtagttttttttgaagaaccttcaaaccattctccataatggttgtacaaatttatattcccactggagtgtacaagggttcccttttctcatgcccttgccagcattttgtattgcctgtcttttggatatataccattttaatgggagtgagatgatatcttactgtagttttgtcttccatttctctgataatcaatgatgttgagcaccttttcttttctttttctttttttttttttgtttgagacagagtcttgctctctcacccaggctggagtgcagtggggcaatcttggctcactgcaagctccgcctcccgggttcatgccattctcctgcctcagcctcccaagtagctgggactacaggcgcccgccaccacgcccagctaattttttgtatttttaggagagacggggtttcaccatgttagccacgatggtctcgatctcctgacctggtgatctgcccaccttggcctcccaaagtgctgggattacaggcgtgagccaccgcgcccggccaagcaccttttcatatgcttattttccatttgtatgtcttcttttgagaaatggttattcaactcttttgcccatcttttgatcaaattattagtttttttttgtatagagttgtttgagctccttatagattacggttactaactccttgtcagataggtggtttgcaaatattttttcctattctgtgggttgtctcttaactttgttgattgtatttgctgtgcagaaactttttaacttgatgtgatctcatttgtctatttttgctttggttacctgtgctagtggggtattgctcaaaacatttttgcccagatcaatgtcctggagattttctccagtattttctggtagttgtttcacggtttaatgtcttagatttaagtctttagtccattttcattttatttttatatatggtgaaggagaggggtctagttccattcttctgcatatggatatccagttttctcagcaccatttaatgaagagacagtcttttcccccagtgtatatgtattcttggcatgtttgttgaaaatgagtttactgtaggtatgtggaattatttctgagttctctattctgttctattggtctatgtgtctacctttatgccagtgccacgctgtttttggttattacagctctgtagtgtaacatgaagtcaggtaacgtggttcctccagttttgttcttctcgttcaggatacttttggctattccggatcttttgtggtttcatataagtttcaggattgttttttctatttctgtatagcatttcattggtattttgacagggattgcattttatttgtagattgctttgggtagtataaacattttaacagtattgtttcttccaatacatgaacatgaaatatctttccattttttggtgtcctcttcaatttctttcatcagtgttttacagtttttattatacagatctttcacttttttggttaattccaggtatttaactttatttctggctgctgtatatgggattcctattttttatttctttttcaaattgttcactgttggcataaagaagtgctactcattttttattttattttattttttttggagacagagccttgctctgtcgcccacgatggagtgcagtggcgcgatctcggctcatggcaagctccacctcccgggttcacgccattctgctgtcttagactcccgagtagctgggactgcaggcacccgccaccacgctcagctaatttttttgtatttttagtagagatggggtttcaccgtgttagccaggatggtctcgatctcctgaccttgtgatccacccacctcggcctcccaaagtgctgggattacaggcatgagccaccgtgcccagccatagaaatgctactgatttttgtatgctgattttgtattctgcaactttactgcatttaccagttataataactttttagtgaagtctttatgttttgccaaacataagattatatcatctgcaaaaaggataatttgatttcttcctttccaatttgaatgccctttatttccttcttttgtctgattgttctagctagagcttccaataccatattgaataacagtggtgaaagtgggcatccttgttgtgttccagatcttagaggaaaagctttcagttattctccatttggtatattagctgtgagtctgtcacatatggcttttattacgttcttccttctatacccagttttttgaaagttatgaaggaatgttaaattttgtcaaatgctttctagtatcaattgaaataattatgttttccttcattgtgttgatatgatgtatcacattgattgatttgcatatattggaccatcctggcatcctagggaataataccacttgatcatgatgaattatctttctaatgtattgttgtattcagtttgctagcattttgtcgaaggtttttgcgtcaataatcatcagagatattggcctgcagttttcttttttgatgtgtctttggtttttctatcagtgtaatactggcctcgtagaatgagtttgggagtattcccacctgctctattgtttgaaataggatttgggtaggattggtattagttcttctttaaatggtagaattcagcagtgaagccattgggttccaggcttttctttactgggaggctttttataacgactttgattttgttacttgttattggtctgttcaggttttggatttcttcatcattcaatcttggtaggcagtatgtgtctatgaatttgtccatttctctaaattttccaatttattggcatatagtttctcatagtagccactaatgatcctttgaattttgcaaattatttgtaatgtctcctttttcatgtctgattttatttatttatatagtctctctttttttttcttagtttgtctggctaaatgtctgtcattttgtttgacttttcaaaagacaacatttttgttcatcttttgtattgtattaattatttcaattttaattatttctgctctgatctttgttttctctttcactaatttgggatttggtttgttcctgcttttctagttctttaagatctatcattaaattttttattaaaagttttccttctcttttcttacagtcacttacagctataagcttccctcttagcactgcttctgttgtatcccataggttttggtatgttgtgtttccattattatttgtctcaagaaatttttcaatattcttcacaatttcttttttgacccactgtcattccggagcatattgttcattttccacgtatttgtatagttttcaaaattctacttgttttattccattgtggtcagagaagatgcttaacattatctcaactcttctgaatgttttaagacttgttttgtgacttaacatatggcctatccttgagaatgatccatgtgctgagcaaacgaatgtgtattctgcagccaatggataaaatgttctgcaaatatgtgttaggtcctcttggtctacagtgcaaattgagtctgattttttggttgatttctgtatggaagatctgtctaataatgaaagtggggtgtcgaaatccctattattgtagtattgtctgtctctctcttttggtctaataacgtttgctgtatatatctgggtgctccagtgttgggtgcatatgtatttaaaattgttacatcctcttgctgaattggtcttttatcataatacagtgaacttctttgtcttttatagtttttattttgaagttctttgaaatttagggtatttttattttatttgaaatgtcctaaagatatcatgtagaaaaagaaaagtagcaggattattttaattttgtcacataatagtgcttggttctttttaattgcatagggtaatacattttaacagatgactatcttgtcatctttttaatcactgtaattagacaatgcctttttaatatatctgacatatatctggaactgtcatcttttgcttggtgatttagttgattttacacttagaaatgtgactcatattttattagaagataatataaagcctcatttttgtatcttattaaaaattctttcagttttactgttttaattatccaaagtctcaagatgtgagtgagaacatattttatagcagtctcagttaattgtattaatagataagagtaaatagttcaaatgttttctacctcttgttaaaaacactttatcagtaaatttataatgcactttctttcaaagtctcaaattataattcattcatcaaaaatgcagttcacaaaaaagtcagataatttgccacaaatgacaacgagtggtttacgatatgtccatcatattctgtataattagttgctttcaaaggataataaaattatagtaggaccataagtaagatgaataaaagaacaaagtcaatatggcaaagatttgtctttcctgtctcccaggaagtgaagcataaaatctcaggaaatctgaataggagaaaatctacatttaaagccatgcatggataaaatttcagagcctccttatacttattaaaagtggaaaaagtcctccttctttccctgaaaatgtgtgccgtctgatcacattaaggatataatttggatgtctgtcccctcaatatctcatgttgaaatgtgcttcctagtgttggaggtggggcttggtgagaggtgttttggtcatgggggccgattcctcatgaatagcttggtgcccttcctatggtaatcagttcatatgagacctggttgttagagtctgggacctcctccctcacttgttttctctctcactcatgtggcatgcctgctccccttcccctttcagcgtgattggaagcttcctgaggcctcaccagaagcagatgctggcactatgcttcttgtacagcctgcataactgtgagccaaaataaacctctttcctttataaattactcagcttcaggttttcctttatagtaacacaaaatgaactaatacaaggacagattgaatttagaatgaacctgagacctggactgtagattttgaatagttcgttttccttcagctgacagttccaaggccctgaatgtgaaaaggggaatgtattctatgccctttcactaacctcgggcgcaaacaaagtcagggcataaactttgcaaattgtttaaacaacagaagtcttacttatttaaaaaatgtaaattgacggtttaaaattctatatgtttatagtgtctaaagtgatgttataatttattaagacaatgtggaaaattaaatcaagctaattaacatgttcatcacctcaaatattttcatttttatggtgagagcatgttaaatttactcagtaattttgaattttacaatgcattattaaccatatttactacagtgtgcaataaatctcattgtaaaaaaaccttattcccccaatctaactgagattttgtgccctttgactgtcatctttcctttccccatgtaccccagcttctatagccatggtcctaccatctgtttctatgagtttaattgttctagattctacattttgtgagaacataaagtatttgtctttcgtgcctggcttatttcacttagcacgatgtcctccaggttcatccgtattgttataaatgacagagtttccttgtattttaaggctgaatagtactccattttttatgtacaccacattttctttatccatttgtctgttgatagacacttaggttgatttcataacttgactatggtgaatagttctgtaatgaacatgggagggatttcaaatcttttaggtaaatgctgaaatagatagtaattttatttttagttttgtatgtatggacatttaaacctccattctattttctgtaattgttgtactgatctacattcctaccaacagtctaacctgttccttttcttcccatccttcctaacacttgctctcataatttttgtagtgatcaggaaaatagagaagtttgaaatgtgagtttcccattagaattacattctattcatggtagaacttctccaatttattttccatctccttcctcctacttcatgtctacaatgacatagatgccttgaattataaacattctagtaacaggatagaactgtgaactaaaccgtatatccaattcacttgccaaagaagtgatagtctgcgccatggttttggaaattagttctcattcatgaattccaaagtttcctaataatcttttttttttttttttgagatggagtcttgctccgtcgcccaggctggagtgcagtggcgcgatctcagctcactgcaagctccgcctcctgtgttcatgccattctcctgcctcagcctcccgagtagctgggactacaggcgcctgccaccacgcccggctaattttttgtatttttagtagagacagggtttcaccgtgttagcaaggatggtctcgatctcctgacttcgtgatctgcccacctcagcctcccaaagtgctgggattacaggtgtgatcccagcccctaataactgcacccagcccctaataaccttttttaatcttagtgaagttgtatgtttcatacacaaattttgtcacatggcctatgataacagagttataaattaagtatatgcaaagttatgcattgtgtagaaataaaataataatgcaatattcatttatagtgattttgactcctcaaaatatttattatatataatattgattttgtaactataacattaatattctattggtgcaacttgttaattaataaatataaataaagtaatgtaaaaaatatacacacacacaagcacatgtgtacacacacacgaggggtaaatggctaagtactttaattttacttagacgtgctcatccctgtaatcctagcactttgggagactgaggcaggaggatcacttgagctcaggagtttgagaccagcctgggtaacatagtgagacctcatctctacttaaaaaaataactgataataaataaataaaataagaataaagaattacatgattgagttgtatcttggatggtgagaaataaatgattcagatttaagctataggccaggtgcagtggctcatgcctgtaatcccagcactttgggaggccgaggcaggtggatcacctgaggtcaggtgttcaagaccagcctggccaacatggtgaaaccccatctctactaaaaatacaaaattacctgagtatggcagcacatgcttgtaatcccagctactcagaaggccgaggccagagaatcacttgaacccaggaggcagaggttgcagtgagccaagcttgcaccactgcactccagcctgggtgacaaagagagactctgtctcaaaaataaaataaaataaagatttaatctatatttgtagtttagaaactaatgattccagatcatagagatgttgaaattggttattattgagaacatggcagaaattatgctattctcattagatctcttgcttttctccacagatatcctttgctttaattttccttctaagatgatcaaacttcctggttttattaccatataaatcttcttttatccacaagccagctttggaatttcagcaaacaccatccttcttcttttccacatcttcacctttgttttcagtcacaggtctaagtccattgacatgataattagtcacctgtctctcatccacatactgctgctcttcacccaggcaatattggtgtccttagacttctttggttcacagaatactcaggatgatcttaggtataaggtcattgtctttttaaacaaggtgatgaggggcctctccatctgcaccccctgcctcctgagtgtgctccaggccatcatcagccccagcatcttctccttggcaaagctcaaacatccttctgcaagtcacatcttaggattcttccttttctcatgggtcctcaacatgttcattggtgtaatcttctgctgtacactgcggctacccccagtgaaacggggccagtcttctgtttgtcatacagcactgttcctttttgcccatgagctacacccacaggagactgtttttcacactaatgactttgagggatgtcacctttatagggttcatggtcctctcaagaggctacatggtgattattttatacagacaataagaggctatctcagtgccttcacacagccagcctgtccccgagtctcaccagtgaaaagagcctcccaggctatcttactgctggtgagttttgtcttcacatactgggtggactttacgttctcattttcaggaggtgtgacatggataaatgattctctgctagtgtggctccaggttattgtggccaatagctatgccgcaattagtcctttgatgctaatttatgctgataaccaaatattcaagactctgcaaatgttatggtttaaatatttgtctcctccaaagctcatgttgaaatttaatcgccaatgtggcagtactaagaagtgatgagaggttaatccattcatgaactcatgaattaatgggttgtcatgagaatgggactggtggctttagaagacgaggaagagagaccactcagcctccttgccatatgatgccgtctgctgcctcaggacactacagaattcccaccagcaagaaggctctgatcatctggtgagatattggaccttccataactgtaataagcaaattccttttcattagaaattgcccagtttcaggcattgtgttataagcaacagtaaatggactaagatcttcttactaagttgtcagaaaataagaataaatgtttaaaaagaagtgatgaaaattaagacttaaaaatgaaattggccatcacctagggtttttaaatgtcacgatattttgtctctgtgtaaatttttaacgggtattattaatctctgttgcatctgatttaggaacttttataatacggcagaaaagcacttgtagatatttgatcacattttatacatcaatcatatatgtctataggctttttttttttttctttgagatggagtttcgctcttgttgcccaggctggagtgcaatggcatgattttgcctcactgcaacctctgccttcaagcggaggatctgttggttttgagttatatttacccagcagtcaaggaaaacctaaacaaagacattaatttgaaaatgccccagctgtagggcatggggcttttggaagaagcaaatacaaattttatttttttttgagataggggtctctctatgttgcccaggttagtattaaactcctgagctcaagcaatcttttcaccttagcctccaaggaggtccaggttcaagcgattttcctgcctcagcctctggagtagctggaattacaggcacctgccaccatgcccagctaattttttgtatttttagtagagacgaggtttcatcatgttggacaggctggtctcgaactcctgatctcaggtgatccacccgccttggcctcccaaagtgcagggcttataggcgtgagccaccacgcctggccttccataggctttttatttcttgtgttctattcttttttttctcatctcaggccagatttctggaatcattttctttttttcctgaattatattatttgaaaattgttttattgaagatcagtttaggcgaactgttgccatatgatctgaaatgtctttcattctcctttttgtaaaagttaaagtacacagttttatgttgacaatctcacatcacactttcaaacaaatatttccctgagtcccaacttccatttttgattttgaaaattacagacatttacaatattgtttgtgtgtgtgtgcgtgtgtgtgtgtaacttaaagttccctctcctcctagctaactttaacttttatcgatttatggctgatattcctatgacactctggtgcatctgtctacagatatttctattttttatattacacttatttaatattcttcattaatcttcattaattcattaatttaattaattggacctttttgttttactccttatatcgcgtaacttcttttatatactttacattgctttgttttcgagttcacattctaggaaacttattcagccaaatagcttggttttactaaaagtttttttcaattctgtatcaactgcaatctaaccatttcattgattctgggtacacaattttaaaaaaaactttgtttgcagttgttctatttagtcacttttcaaatatgccacatcatgcttctagtctcctactatttactctttaaaaatttaaattcatttttgttttctcttaatctgatattcatatctcatatcacaaggtataattctgataatttctggtttggtaattattaattctgctggcttgtttgctgcctactttgtaatttaattgtcataagtgacatcattttgttccttgagaaggctgagggtctcagtgatagatgactggaaagaaaatttggaagcttgacacagtggcacacatttgtaattctagaaactcaggaggctaaggtgagaagatcgcttgagcccaggagtttaatactagcctgggcaacatggagagacccctatctcaaaaaaaaaaaaaaaaaaaaagagaaagaaaatttgtatttgcttcttccaaaagccccatgccctacagctggggcattttcaaattaatgtcttggtttaggttttccttgactatttatgccagataaatataactcaaaaccaacaggtcctttattcccctcagagtttaagtatcaaggtagaaatagttccattgtgtaatctggcttaccaacttctcttttgactcaaagtataaaaccttgaaagtattagcattgtgtaggtgtcccagtttcattcaatgggttaaatacattgatgttattttccctttacctacacaattgacataaatcaacatttcacattggtagtaccagccaatcccttcagaggagcccgggcgtccctgtttgatttcaaccaagcttaagaattatctttattttattcccatggggattccctctattatcttgtaggttcagctagacatttaaatatatattaatttatacaccatttataaactaaagagtttctgcaaagcaaaagaaactatcaacagaataaacagactatctacagaatcagagaaaacaattaccaactgtgcatctggcaaagttccagaatctataaggattagtccataatatccagaatctataaggaacaaatcaataaaccaaaaacaaacagctccattaaaaatgggcaaaggacataaatgcttctgaaaataagacattcgataagccaaaaacataaaaatgctcatcactacttatcagcaaaatgtaaattaaaaccacaaactatctgaccctagtcagaagggctattattaaaaagtcaaaaaataacagttgctggagagtttgcagagaaaagggggtgcctgcacaccattggtagaaatgtaagttcattcagccactgtggaaagcagtctggaaatttctcgaagaacttaaaacagaactactattcaacccagcaatcccactactaggtatacaatcaaaggaaaatataccattctatagagaagacacatgcacttgtatgctcatcaccacactatgcacaatagcaaagacatggaatgaacctaagtgtccatcagtggtggactggatcaagaaaatattgtacatgtacaccatcgaatactatgcaaacaaaaaagagtaaaattatgccccttgcagtaacatagatgcagctggaggccatcatcttcaatgaattaactcagaatcagaaaacaaatactggccaggcgcagagactcacgtctgtaatctcagcactttgggaggccaaggggggcagatcacatgaggtcaggagctcaaggccagcctagccaacatggtgaaaccccacccatctttactaaaaatactaaaaattagctggacatggtgacgggcacctgtaatcccagctactcgggaggctgaggcaggagaattgcttgaacctgggaggcagaggtagcagtgagctgagatcctccattgcactccagcctgggcaacaagagcaaaactctgtctcaaaaataacataaaataaaaataaaataaaatataaaaataaataaacctatttgtcatttgtgtgtcttctgcaaaatatctgttcaagtaattttcttcttttttaattgggttctttgttttcttgctgtcgagttgtttgaattttttttttttttgagatggagtctcactctgttgcccaggctggagtgcagtggtgcaatcttggctcactgcaacctccgcttcccaggttcaaacgactcttgtgcctcagcctcccaagtagctgggattacaggtgtgcaccaccacaccacactaatttttgtatttttagtggagagggggtttcaccatgttgtccaggctggtcttgaactcctgacttcaggtgatccacccaccttggcctcccaaagtgctgggattacaggcgtgagccactgcaccaaccaagttgtttgaattccttacatattttggatattagccacctatctgatgtatggttcataaatattttctatcactctgtggattatgtcttcactttgttaatggtttcatttgctgtacagaagctttttagtttgatgcaatctcatttgtctatttttgcctttgttgtcgtgcttttggggttatacaaaaaaaaattaccaagtctagtgttatgggccttttccccatgttttcttatagtggtgtttaaaatttcaggaaactcttaacatttttaaacattgcctatttgatacttattttctccccacatcatttctgtgtaaaaaattttttctctgtttttttttgactagtttattttgtagttatacatctttttctacaaaaaacgtttggaatttttaatgatttctgattttttctgtgtctaactcattgatttcttatttttaaattaacacctatgtttttattcatttatagtcctcattgttgagttgaggtagtaatgcgtttagttgcattatttatatagatttaaatattgtaaatatacatttaataactggactttcagctgtctgaaaaatgctgggggataattgggtatggatatttctaagtattgtgtattgtcacctttttgtgttgtaatgcatctttctcactttgtttgctgtttgtcatgttactgtgttagatactaaaagataaatttttacttactttctttctgttttttttttttagagatgaggtctcacgctgtcacccaggctggggtacagtggtgtgatcatagctcactgcagccttgaactcctgggctcaagcaattctcctgccttagcctccatagtagctagaagtgcagatacctctttgatatactgatttcctttcttttcaatatatacacagcagtgggatttctggatcatagaatagctccacttttagttttctgaggaacatccaaactgctgtccatagtggttgtactaataatttacattctcaccaacagtgtatgaggggttctcttttttccacaacctcatcagcatttgttatagcctgtgttttaaatataagcaattttggctaggtgcagtggctcacacctgtaatcccagcactttaggaggccgaggtgggcggatcacaaggtcaggagttcgagaccagcctgaccaatatggtgaaacactctctccactaaaaatacaaaaattggccagccgtggtggcgggcacctttagtcccagctactcaggaggctgaggcaggagaatcgcttgaacctgggaggcagaggttgcagtgagctaagatcatgccactgcactccagcctgggcaacagagcaagactctgtctcaaaatatatatataattttaacaggggtgaaaaaatatctcattgtagttttgatttgcatttctctaatgatcaatgatgttgaccacgtttttatatacctgttggccatttgtctgtcttcctttaagaaatggtgatatggtttggatctgtgtccccacccaaatttcatgtggaattgtaatccccaatgttggaggtggggcttggcaggagttgatgggatcatgggggcagagttctcattaataggtttgcaccatcaactcggtgctattctcatgatagtgagtgagttatcattaatctggttgtttaaaagtgtgtagcacctcccccatctctgttgctcctgctccagccgtgtaagatgtgcctgcttcccctttgtgccttctgccatgattataagtttcctgaggcctctccagaagcagaagccactaggctttctatatatcatgcagaaccatgagccaattaaacctcttttctttataaattacccagtctcaggtattttgttatagcaatgtgagaacagactaatacacatggctattcaaatactttgcccattttttaaatcagattttgcatttttccctttagagttatttgagttccttatatatg

SEQ ID NO: 244 - DNA, 31737 bp, Homo sapiens
ccaccctacacagaccttgcatccatcagcaaaccttcatatgtctcaattgtgtccatttatctttatctctaacaaaagcctacaccaggtaccactggcaggtgccatgcacgtgaacgcggagtctgctgttggaaatgtgttgggaagggagagttcccggtaagaattatgtatttaggagctttccaaatactgatggcatgttgagccatcagactggataaaatcacacgaaagaggtgctagtattgggcccttgggtggttcagcgcctggaagtcaaggagaagagaaagagagcaaaggggactgagagggagcaggcagtgaggtctgagggaccgcaggagagcatggggacccaaatgcaagggaagaaagggtgtcagctccatcacgtgttctcctccagacagagacagtactgtatatgcaggtttctccaaacttcttcctttctaggtttcccttaatgctttctctacctataatccaagacttttacccaaaaagacttttaccacggatatcagataaattcaccaccccttaatggcttcctattgccttgagggaaaaaaaactccacagcttcccccaccagctctgcagatctggtccctgcctaactccagcctcaagtcctggcaagcccttcactgaggcatctgaactccagccttctctctgacctagagccttcagccctggggttccccttgcctagcacctcctttctcattctcttcaagaacttggcttctgttctgagagtggtttaaaacccctagttccctgggagggggaggaggggggaggctctgacatagtgtcctggtcatgaacatcttctctccaataacttgggctcagatactcagattctacctctggagagctgcataaccctagaatattatttaatctctctcaggtttcagtttccttatctataaaaggggaatgatgaagatgatgaagacgacaattataataattgtttgtgttacttatataagtaatagtcacatttcttcaagactctggagaatgaaatgagacacactacaaagcttgtgagcctagagttttgggggccctggcactgttctaggcatgggagatagaacattaagcaaaacaaacgaattccttgtcccattggggcttatcttcttgagggaagcagacaacacactggtagttatatttacaacctactgggactgggtcataggagaggggaaaagcctgctgttatagattgaggctccctgaggagcagagacctcccaggaagtcaggtggcaaatcataccgggatggggaggagtgttccattcattcagagggaacagaaggtgagaaggaccaaagaggaagagagccaagcttggagaaagaattggaaggcagccagtgtgtctgggggccatggaatgaagacaggatagggacagaggagcaagaaatcaaggcaggcccgtgtgaagaccggggatttgactctcgttgcagcaggatatcagtgatcagttctctgttccctagtatttgccaaatctgcaacacttgatagagctctttcctgccttgcagttgggtccccatgctatcctgatctccgtcagtcctcgctggctgctccctcccagtccccttggctccttctttagactctcttctttgacttccaggtgctgacatgcccagggcccaatgctagcaacactttcttattcatgtgattttatccagtccgaagcttcagcatgccatcaatatttggaaagctcctaaatgtccatatttcccacctggaactctcccctcaactcccaaaacacatttccaactgctgattttgtctctacatgagaggtccctgtgtttacagggcagaaatgtagaccgtcccattctaagcggccacaattgaccttttcaaaagtcgtcgtctggttatgtcatggccctcatgcgtcttagaataaaaacaaattcccgataacacagccctcatgcatcttagaataaaaacaaagttcccggctgggcgagatggcttgtgagatggctcatgtctgtaattcataattccagcattttgagagtgagagttgggaggactgattgagtccaggtgtttgagaccagcccgggcaacatagcgagaccccatgtctacaaaaaaataaaaaattagccgttgtgtgcctatactcccagctactcaggaggatgaggtgggaggatcacttgagccagggaggttgaggctgcaataagccgagattgtgccactgtactcagcctgggcaacagagtaagatcctgtctcagaaaacaacaactaaacaaaaaaaaaacaacaacaacaaaacaaaacaaaagtcctgagaacatggctgtcaagatctggtgggccatgctaagactctgggatttattccaagagcactgggaagccactaaaggaaatggaaataaaaccaaaagaaccattgaacgtcaagtaactgtttctttcccaagagatgttaatgtctcccaaaagaccccatcctggtttaacaaagaggatatgacaaactgtaagaagttggagtcctgctgggtgtggtggctcacgcctgtaatcccagcactttgggaggccgaggtgggtggatcacgaggtcagcagttcgagaccagcctgaccaacatggtgaaaccctgtctctactaaaaacacaaagggaggcagaggttgcagtgagctgaaattgcgccactgcactccagcctgggtgacagagtgacaccctgtctcaaaaaaaaaaaaagagagagaaaagagaaaactaaggctcaggatcattcagtaacctgcctgaggtcacacagctaacaatttgtttccctactttcccgactacaatgaagccaatgcactagttgaacccaaggtcagactccccctttatcaccaacctaaatttcctcaattctaaaaattggcactgatgcatatttcttgaccccctatttccaggatgtttaccagtcagtcatgtgtggctctggggcaaggttgaaacgtccgcacccactgtcctcccttccccacattctggaacagcaatacagtgtttcacttggttgcctgagggctagtttcctcccacctgtgtcactcccttgagttcttggtatacctgtattcaggaccctctttttcaccagactgtaacagactgtaaatcttttttgtttgtttttttttttttttttttttgagacggagtttcgctcttattgcccaggctggagtgcaatgatgcaacctcggctcactgcagcctccacctcccgggttcaagcaattctcctgcctcagcctcctgagtagctgggattacaggcgcccgccaacatgccctgctaattttttgtatttttagtagaaacagggtttcaccatgttggccgggctggtctcaaactcctaacctcaggtgatccgcccgccttggcctcccaaaatgctgggattataggcgtgagccaccacgcccagctgaaatctcttttgaaagggaaaccgggcacggtggctcatgcctataatcccagcactttgggaggccaaggcgctaacctaaacccaagagttcaagaccagcctgggcaatatggcgaaaccctgtctctatgaaaaatataaaaattagctgggcatagggctgggcacggtggctcacgcctgtaatcccagcactttggaggccgaggcaggtggatcaggaggtcaggagttcgagaccatcctggctaacatggtgaaaccttgtctctactaaaaatacaaaaaaaattagccaggcgtggtggcgggcacctgtagtcccagctactcaggaggttgaggcaggagaatggcatgaaccagggagcggaggctgcagtgagccgagattgcaccactgcactccagcctgggggacggagcgagactgtctcaaaaaaaaaaaaaaaaattagctgggcatggtggttggcacccatggttccatctactcaggaggctgagatggaaggatctcttgatcccagggaggtcaaggctgcagtgagccgagatggcatcaccatactccagcctgggccacacaccctgtctcaaaataaaaagaaagtggggaagaaaatgtaatacaaattaatataccaacagcaattagtgagtactttttccatggagctgggagagagaatgtttgtaaaattaaaatgttctacgctagaaatcaactttccttctatgccttctttatttcaccccttatagctagttaataaatctcacaaatcctatccttctaatctctctgaaatgtatgtaccctttcctttctattctcaccacccatgtttctttgtttccttctagcctgtgtaataatctcataatcgcatctcctgtacctgccttctttctagtccagaatactttttcctaaattccgctaataaccatcctgctactgctttgtgtgaaattctccaaaaaaaattttacttttccaaaataagtcaagctccctctcttaggatgcaaaaccacaccatggtcccagccaatctttcagcctgattcactcagtatatatttattgacctctccttcctcccaagcacttggctagatagtaattaaagagtgaggcacaaaacaaattggattcctcccctcatggagcttatattttaacaggaaacatagacattgaataaattaaaacaaaaaaagacaagaatataattacagtatctatcctagagaaatacactcatgcagaaagcatacacaaggatgcagcactgtttccagtagtgaaaagctagaaacaacctacatgttcaccaaaagaaaatggccacaaaaactataccatatccaaattatccaaattttaaaatatagacaacaggccgggcgcggtggctcacacctgtaatcccagcactttgggaagccgaggtgggcggatcacgaggtcaggagttcaagaccagcctggccaacatggtgaaaccccgtctcctctaaaaatacaaaaaaatcagctgggcacagtggcaggcgcctgtaatcccagctactgaggagactgaggcagaagaatcgcttgaacccgggaggcagaggttgcagtgagccaagatcgcgccactgcactctagcctgggtgacagagcaagactccatctcagaaaaaaaaaaaatagaatatagacaacaggccgggtgcagtggctcatgcctgtaatcccagcactttgggaggcagaggtggtctgatcacctcaggtcaggcgttcgagaccagcctggccaacatggcgaaaccccatctctactaaaaatacaaaaattagccgggcgtagtggcgtgcgcctgtaatcccagctacttgggaggctgaggcaggagaatcacttgaacccagcaggcagaggttgcagtgagccgagatcatgccactgggcaacagagcgagactccctctcagaaaaaatacacactgtgaataaaatgtttactagttccatatcctgcttttggataaacatttgatacaccattctatacttactcctctctttgctctattctgactgcctgcacccctctccgccacccaatcccccaacatatatgccatatatataaacatcaacctgtaaccaccctaatcagccccaaggtcactcgaaatgccacctccttcagttactctctcctttgttcaatgcctcctttatgacactgtctgcgttatgcctagccctgggtatgttatttctcttactacctgaataggggggaggctcttccaagggaagaccagtttcctccatgttgtggaacggtcaacacacaggaggtgctccaatatttagctgttccgctgttctgtgctccttggatttttttttttttttttgagacaatgtctcactctgtcacccaggctggagtgcagtggcgcgatctcagctcactgcaacctctggggttcaagcgattctcctgcctgagcctcttgagtagctggaattacaggcgtgcaccaccacacctggctgatttttgaatttttagtagagaggcagtttcaccatgttggtctccaactcctgacctcaagtgatctgcccgcctcccaaagtgctgagattgattacaggtgtgagccactgctcctggcctccctggattctttttttttttttttttgagaaggtgtttccctcttgttgcccaggctggagtgcaatggcgcaatctcagctcactgcgacgtctgcctccccagttcaagcgattctcctgcctcagcctcactagtagctaggattacaggcgcctgccaccacacccagctgattttttgtatttttagtagagacggggtttcactatgttggccaggctgggctcgaactcctaacctcaggcgatgcacccgcctcagcctcccaaagtgctaggattacaggcatgacacacctcgcccggctcctggattctttaatacactcgtttttttcctatctcacgtgacatgtacatattaagcacccactatgtaccaggcattgttctaggtgctggagatgccgcagggaaccaaacagatcaaaatgcctatcctcatggagttaacatttgatattatagtgtgttagatattaaaataagtactatggagagaaatacaaggggcaaaggggctacagagtggaggggtggtgagggaaatgttaaatagattggccctgaaaggcttcatcatagacacatctaaataaagatctgaagggggtgacagtgggagccacaaggagttctaggggaagagcattccaggttcagggacaggcaagcgaagtccttgaagcaaagtgcacccagtgtttcaaagaacagcaaggaggccagcatggcattgtggctggcgtggcgacaagcccggaaattaggatggggatggtgcatcttgattgcacggatctttctggccatggtaaagattttgaatttcattctgaatgggcctgagagctctgaataatctgagcaaaatggccgggctcggttagtaagtggcgtattcaacgggttcacaccatcaggagcgctcctaaaatagtaacacagggtctctctcctttgctgaaatcactcagatatttaaatgtatctctatttcaggttacttctacaaccataacagtaataataataatagtaagaagaggactgagtgcagtggctggctcacgcttgtaatcccagcaccttgggaggccaaggccggcggattgcttgagtccaggagttcgagaccagcctggacaacatggcgaaaccctgtctctacaaaatacaaaaattattacaaaattagccaggagtggtggcaggcacctgtaatcccagctactcaagagtctgaggcaggagatcacttgaacccaggaggcagaggttgcagtgagccaagatcatgccattgcactccagcctgggcaaaaagagtgaaactgtcttaaataaaataaaataaaaatgtgccgggcttggtggcacgcgcctataatcccagctactcaggaggctgagacgggaagataatttgagcccaagaggtcgaggctgcagtgagcagtgttcatgccgctgcactccagcctggccgacagtctcaaaaaataaaataaataaataaaataagaaaaacagggaggagaacaggagggataagaaggggaaaaacaggccggcctcggtgggaagccagcactttgggaggcagaggcaggaggatcacgtgaggtcaggaattccagactagcctggccaacatggtgaaaccctgtctctactaaaagtacaaaaattagccgggcatggtggtacatgtctgtaatcccagctacttgggagactaaggcaggagaatcgcttgaaccccggaggcggaagttgcagtaagcagagatggagccactgcactccagcctgggcaacagagactctgcctcaaaataataataataataaaaggggaaaaacaaaatgatttactgcacccccactacgtgccactctcagctccaaagctgatttatattatggtgttacttagttctcctgataaccttcatgcttaaatccatttgcagatgaggaaactggggcctgaggttaactttctgacttaattctcttacttgaagatctacaactagaagaaagtgggattctagcccagatccaatgccaaaagccatgctgactcataccattcttttctgtcctaagtggttgaccttggccttaggaaaacagaataataataaggatcactgattgggcattgactctgggtcaagcacaccatcctccattttgagatcccccagcagagttggaatccaagtctcccagagtacaaagtggcaccctaggagcagtgaccacccccccccacagcaggtcagggctgagctcttgaaaatggctctctgggttcaaaccaaaactcgattccccagctgtgccgctttggggcttcctttgaactctctttgactccattttccccattttacagatggggataatagaactccctaacggccgggcgcagtggctccagtttgtaatcccagcactttgggaggccgaggtgggcaggtcgcttgagctcaggagttcaaggccaatctgggcagcatagcgagacccctcttcactgtctctacaaaaaatacaaaaatgagccaggcatggtggctgaagcctgtaatcctagcactttgggagcctgaggcaggaggattgcttgagtccaggagttcaagaccagccctggcaacatagcgagacccctatctcaatttatttaaaaaaaataaataaataaaaaataaaaattaataggctgggcacggtggctcacgcctgtaatcccagcactttgggagtctgaggcgggcggatcacgaggtcaggagattgagaccatcctggctaacacagtgaaaccctgcctgtactaaaaatacaaaaagttagccgggtgcggtggcacgcacctgtagtcccagctactcaggaggctgaggcaggagaatcgcctgaacccgggaggcggaggttgcagtgagctgagatcgcgccactgaactccagcctgggcaacagagcgagactctgtctcaaaaaaaaaaaaaaaaaaatatatatatatatatatatatgccaggcacggtggctcacgcctgtaatcccagcactttgggagaccaacgtgggcggatcacatgaggtcaggatttcgagcccagcctggccaacatggtgaaaccctgtctctactaaaaatacaaaaattatttttttgtatttgagacttcatgtcaaaaaataaaattaaattaaaaaatagccgggtgcagtggctcacgcctgtaatcccagcactttgggaggctgaggcagacggggcggatcacctgaggtcaggagaaaccccctctctactaaaaatacaaaaaattacccaggtgctgcggcgtgtgcctgtaatcccagctactcgggaggctgaggtaggagaatcgcttgaacccgggaagtggaggctgcagtgagccgagatggcgccactgcactgcagcctgggctacagagcaagactccgtccgtctcaataaataattaattaattaattaaaatataaaaataaaatttaaaaaatagtactcgctgacaagtgaatttgggaggaataagcaagacctcactcgtggtaacgggcgcggggtgggggaagtcggggggtggcacacagcgctcagttaagtcacgccattatgatcacgaccaccgcccgcggccgcagaacctgcccgctctgcacaccagggcggacacccacagacgcgtccttcacccgcgcagggacctgccaggggcgcttataccggagggtgttcagagcaggaaaggaagagatcaaatctgaacccggatccgtctcctacagaacctgagtcgctcaatcatcagctagatcgccccgtgtagacaaagcaagtggaattatttgaagagtataccttgagctgggcaatcctcatagaaggtcggggacgacctgcccttcagtgttcctggagcatcttctccaaagtggaggtcgagccaggcctaggaggaaagagagggcaactgcggacgaccccaccgcagaagaggtgaaaccgacgggctccaggtaggtgtgtcctccccaaccacaccctcccacagggcccggagactggggaaggccggagatgagattagggtcagagccacacccctgacccgcgtacaggacaaactgaagccacgcgtctacactggcgctccgaactgcgttggcccaaagcttcttcaccgcttccagcggagggcttaaagcggtccccccagccctcacacagcgggttttctcagaacccagtctccagagaccgcctggattcaaatcctgccgccgccctcagccgctgggagagccgggccttggcctcaccttcttcccagcctcacctgcagaatgggcgtgtcccgagggttaaatgccctcatcaccatgaagccttaaaacggtgcctggcacatggcgatacgcaataaacgtccgccaaaatgacgttagccaggattcgccccggaaggcttcctgttctcatacagcccttcaatgagggctaatccctttggctcctttaacaactttttttttaatgtggttagcacattttgttgacttttttttttttacaaagaccaagtcagcatgtcctcttaaaaatatcttaagagattatgttttgttcctacttgctttgaggaatgacttcgtcctggttgagtggggtgaaaacagtgaaatgcgaacaaggataataagaccatctttcctgtactgtttcttaaaaaaggaggggagtgaggaattaaaaattcagatgctggattttaaagactgtcatgctaagtattttcttatcaacttcctttttttttttttgtcctcatataaacataacagtagttgagtttttcctttcttcttgactcaaaaaaaaaactgacacataaacttctccaaaccaatacagctgaactttctacaaagatttgtaactgatatattccttaaagaaaataagaatgctctgaacagaaataaacagtttctgcagcagttttatttgaagcccacaaataaaaacagcatgtccccaaggaaacaaaatagaattgggagtcgcagctaaaatggctctgccctaatcctctcttacccagtactatggggtttgtttacaggaaacccttgccacgagaagttttctgctagttttcaaccgtattttggcatcatcaactcaggcatatggaaacaaattaaatattcagcttaaaaaaaaattacaaagtaaaggaagagaacgctgacctgttcctttctaccttcttcaggatgggtagaggcatgaagaaatgcaggctcccctccccctccgggccacgcttcccggctgggtggaaactatctcattaccacattttcaacaagtagaccagtttcctcctttaatcaaagttactttgtggttgtttggcagtctgcgcatgccatgtttttatagctatagaaaatgcgtatttatttattttgagatgactatgaccatatgacaaacctaagtcagcctcttatagccaatgatttataagagctctgaaaagcccggcctttaaacattttaatagaggctctctcatcctttgtaagtggaagtgtaaattggtacagtccttttgtaaacaactcaatgagacaagtcaagggccttacaaatgttcatacatttggatgcagcaataacactcctggaatcaatcctaaggaaacagccctaatgtaggaaaaggtgttaggaacaaagatcttcgtggtaacaagatttactacgagggggagagcaatacacgttcactctccatgcatgtgtggagggacacaaataaaggagtggttagtcatccaagttatgtatccccacacgattacatacagccattttagaattagaaagctttgaaaaataggccattgggaaatatttataatagcaaatgaaaaaaccgagatgcaaagttgtatttttaatgaactctaattttttctattagtaacgaaaaaaggatgtaatatacataaaaatatttaaattgattttatcagaaaaattttagtacagactgaatattatatgaaaacaaaaaaattttatttcattagctgtaataatggcacggattattacagaatatgcattatatatatatttaaagatgtatactgaaggatatagaagaatgacatgacataggagaatttataatactttagtaaataaaaaaacaagagaattgaaccaaaggtggttaacatcttgaaactagaacttgcccaggcaccgtggttcacgcctgtaatcccagcactttgggaggccgaggcaggtagatcatgaggccaggagatcaagaccatcctggctaacacggtgaaaccccgtctctactaaaaatacaaaaaattagccgggcgtggtggtgggtgcctgtagtcccagctatttaggaggctgaggcaggagaatggtgtgaacccgggaggcagagattgcagtgagctgagatcgtgccactgcactccagcctgggcgacagagcgagactccatctcaaaaaaaaaaaaaagaaaaagaaaaagaaactagaactgggcatcagatatgggggttactcattacactatttttattattctctctactttcgcatacatttcaaaatttttattaaaattgtttctttttttctttttttacccttaatcctatgatgggttatatttaaaaatttttttaatgtttgtttttcaataatggcatatgtatgaccctttttctactttctatttttctctaattatttttcataatctacttatattacctttgaaataaattaacatttattttaccaaaaagtaatttaaaataagaatagtaaacagttccacagaaaagtttttcttgccatgtaattctagtgaatcctcagaatgctatgataagcctgtgtaccttaaaatgtgagcttctaaatggtccaaatcttttgggacggcaccgtgccatctgagactgctgtaaatatgatcagctgataaaaggccagctgcaactaaccattttaaagattaggaaccatttaaaaacacacacacacacacacacaccacctctggcctcttaagtgttaagtggcaagatactctggtttatttctaaagtttcatgcaataatcacgtaagcaccgagcaggacagaattctacataccgccaagctgactcagaaagaagggttccacattccttaattagcagcatgagaaaagcaccacttcctgcggtggagttcccatttcatccagccactccactggctcggtacatcctcaagtccacgaaaaagattttcataaagtctggagacacagtgttgtttaatttatttcattttactttgttttgttttatcctactttattctattatactctatcctattatatgtattctaatttttacaaattgaagatgtttgtaatgacgtagattctttgtttctagactttatggatgcctgtatatactgaaatcacagttggaggcagagtaggtgaacacttgaccaacttgaaaatacagcttctactttgggaggccaaggtgggaggatcacttgagcccaggagtttgagaccagcctgaacaacatagtgagacccccccatctctatttttaatctttctttttttttttttttttaagacagaatctcactctgtcacccaggctacagtgcagtggcatgatctcggctcactgcagtctccctgtcccgggttcaagcaattctcatgtctcagcctcccgagtagctgggactacaggcatgcaccaccatgctcggctaatttttgtatttttagtagagatgaggtttcaccatgttagccaggctgttctcaaactcctgacctcaagtgatctgcccacgtaaaactcccaaattgctgggattacaggcgtgagccacacacacacccgcagcccccaccaccaccagtcgtctctattttttaaacgaaagaaaatacagctttcttgattattaacagtcaaaagattcaaagtcctagaccagaagtttcttttttagtacctatgacttaagtttatgatttggattaaagttctctggcagaacacccacaggatgccaaagcctgaggaagatttccgaacaagattacacggttttccaatgggatacatttgatcacgtgtgaaaacatggtggcagcactactgcaaccttaaatgaaagggcaaattctcaggaaacacattctgcttgtaaatattggatgtaaccattctaacagttatttacttttaacttgagaaattttaaagaaatgtagccgggcgcggtggctcatgcctgtaatctcagcactttgggaggccgaggcgggtggatcgcctgaggtaaggagttcgagaccagcctggccaacatggtgaaaccccatctctactaaaaatgaaaaattagccggtcatggtggcaggcgcctgtatgtaattccagctactcggcaggctgaggcaggagactcgcttgaacccaggaggtggaggttgcagtgagccgagatggcgccattgcacttcagcctgggtgacagagcaagactcaaaaaaaaaaaaaaaaaatttctagacttttttcctttttccctttctaagcttttaaagattttatgtctgtcttagttttcaagttatacagcaaaacactgtagatccattacagaaacactaaaattttagggtataagaattcaaagcttctattatctggaacacaagggcacccctcattgccagtgtattctgttgtgttctgtttgcatagaatccagcctaaatgctgcccacctggagtgagttgctagatggactgaaataatcctagcaaacttgtaatggtttgggcacaaccactgctcctttgccatctagctggtactgctgctgttaccaggtctgttagatagcgaccgatgaggcctcctggccttgttgatatttctttgcctatcagtggatcgttagttggagtatttccttagtcacagaccggccttttattgggatgttctcagtaggaactacatttgcagataacagatggttatttaaataagaatgtgaaaaatatatatactctttctcttctggggcctaagatggttttttgctgattcttaaacctgtagctgtttttatgagtggatatctgattttttaaaaatctctcatgacatgtaaatgtttaagttgtttgaaaacatttacattttctgaccagccagcaacacttacaatcttccatagttcctaagattaagaaaacaggagaaagctagagagatttggcaaagtatgtaataacctagcaaggaaattcttgagcaagagtatatgggtttgaatttattggaacatttgaaagcaattaaattttttttcctccaaacttatttttgtcctttttaaagcacacacaggcaaacaactgaaaaagatcattgcaagtaaaatgaatcattaagctgatcaagcctagaaaccaccaccagaagtatttatagcattattagggtggagtatctataatccattctcagacttattataagtctcaagatccaccctttgaaaagctaatcctatcctcaatcttcaaatttaattagtatttattgatctcatatggaacgtccagcacagtgttaaaaaggaccatcttcatcaaaaaaaaagaaaaataaaaaaacaaaaaaatggaaaaaaataaagaaattaaagaaaaagcaaatgaaacaaaaggtaccatcttccaaatgtgagaataggtgctcaaatgatatctatggttcaactatacatgtgtgttgaacaaatgtaaatagcatatagtagaagccaccgtaaatgaatcagaatgattcaggctaactttacagtaaactagaagaacactgctgttagatctgtgtatctgccatatttcaaatacaagagtcctcacattttacaaggtcacttaggaaagattagaggacacactctaatatgcaatgtataattctttttttttttttttttttgagacggagtctcactctgtcacccaggctggagtgcagtggcacaatctcggctcactgcaacctccgcctcctgggtttaagcaattctttgcctcagcctcctgagtagctgggattacaggcgcccaccaccacatccagataatttttgtatttttagtagagatggggtttcaccatcttggccaggatgatcttaaactcctgaccttgtgatccacccgcctgggcctcccaaagtgctggggttacaggcataagccaccatgcctggccaattcttttgtttttgttgttctggtcatgcaatgtataattcttttttggttgtttgtttgtttgttttgagaaggagtctttgctctgtcacccaggctggagtgcagtggtgcgatctcagctcactgcaagtttcgctcctgggttcaggccattctcctgcctcagcctcctgagtaactgggactataggcgcccgccaccatgtccagctaatttttttgtattttttagtagagacgggggtttcaccatgttagccaggatggtctcaatctcctgacctcgtgatccacctgcctcggcctcccaaactgctgggattacaggggtgagccaccatacctggccttttttttttttttttttttttttgagacggagtctcactgtattggccaggctggagtgcaatggcatgatctcaactccctgcaacctctgcctcctggagtcaagcaattctcctgcctcagcctatgaagtagctgggattacaggcacccgccaccacgcccagataatttttgtatttttagtagagatagggtttcactatgttgttggccagtctggtctcaaactcttgacctcaggtgatctacctgcctcggcctcccaaagtgctgggattacaggtgtgagccactgtgcccggccgcaatgtataattcttaaagaatacttttttatttttatgattagaaagccttacttggctgggcatggtggctcacatctgtaatcccagcactttggaaggctgaggcaggaggattgctcgaggccaggatttggaggctgcaatgagccacgactgtgccactgcactccagctcgggcaggagagcaacaccctgtcacgaaaaaaaaaaaaaattaatccctacatattatagaaaatttcaaaattgcacccataaacccaacacataacatgcagaaataaccactgttccaattttgctgccttcctgcagctttaaaaaaaaatggccattttccaaaacattatctgggcgtggtggcatgtgcctatagtcccagctacctgggagactgagttgggaggatcacctgagaccgagagttagaggctgcagtgagccatgatcatgccgctgcactccagcctgggcaacagagcaagactctgtctctaatgattgataataataataataatgtaaagctttttatttttcctttttttgagacagggtcttgctttgcactgtcccccagggtggagtacaatgtcaggatcatggctgagactaaaagctcatgccaccacgcccagctaatcttggcttttttttttttttttgatagagtctcgctctgtcgcccaggttggagtgcagtggcgaaatctcggctcactgcaacctccacctcccaggttcaagcaattgtcctgtctcagcctcccgagtagctgggaatactggcacacgccatcaagtccagctaaattttgtatttttaatagagatggggttttgccatattggtcaggctggtctcgaactcctgacctcaggtgattcacctgcctcagcctgcaaagtgctgagattacaggcttgagccaccacacccggccatctttgcatttttatacaaataaaaataagtaaatacgggctgggcatggtggctcatgcctgtgatcccagcactttggtaggccaaggcgggtagatcacttgaggtcaggagttcaagaccagcctggccaaatcatgaaacccagtctctactaaaaataccaaaagaaattagccgaatgcggtggctggtgcctgtaattccagctgctcaggaggctgaggcaggagaatcacttgaacctgggaggcagaggttgcagtaagctgagatcacaccaatgcactccagcctgggtgacaagagcgaaactctgtctcataaataaataattaaataatctttaccctggtcctagggatgaccctgcaaagggaaggggactcgagagtcaggggaaccacagtgggtgggagagagactgacttttctctgtgtaccttttgatatcagaattatgttttaacttcataaaagatacatatgtcgatttttttttttttttgagacagagtctagttctgccgcccaggctggattgcagcggcgcgatctccgctcactgcaagctcctcctcccaggttaacgccattctcctgcctcagcctcccgcgtagctgggactacaggtgcccaccaccatgcccagctaattttttgtacttttttagtagggatggggtttcaccgtgttagccaggatagtctcgatctgctgacctcgtggtccgcctgcctcagcctcccaaagtgctgggattacaggtatgagccaccgtgcccggctcttctcttgttttttattttagaatcaatttttctggggttagggcagggatggggtgaagggcacagtaactaatcataggacacctctattttgcccttgagtagattttcagaaaagccttgacaacacccccagaactagatggcctaaccaaataaaatggcaacacctaaagatacttataaaataaatctttaggcccggcacggtggctcacgcctctaatcccagcactttgggaggctgaggagggcagatcatgaggtcaggagatcgagaccaacctggctaacacggggaaaccccgtctttactaaaaatacaaaaaattagcccgcatggtggcagatgcctgtagtccagctacttaggaggctgaggcaggagaattgcttgaacccgggaggcggaggtcacagtgagctgagatcacgctactgcactccagtctgggcaacaaagtgagactccgtcccaaaaaaataaaataaaaataaataaataaatctttacactatttgtggtttatattctagggctttttcactcattccctaggcatgtgggacctcgaagatgccgaatcagctaaacgggaggtggcttgagtaggatttgctgccagctaaagcgtgagatgctattgcatgtgcaaggcaaggctttcttcagcggcatcatcttccaaaatagcccaggtatatctcaccagaattaaaccgggctgcaggtggcctttcctcatacttgaccaatgacgtgattaatttagatctgttcggaagtatttatttaaatccattctctccctgagtaggtgtgaactttcctcttcctactatttctttgaaatatttccaccttacatgaatgagccattgcactggagcaagttttcttccagaacataaaatagatcatatgtattcacacaaatgtaaaaacgatgtgcaatttgagctttccctcaaagaaaataacagtgattctggttttaattcctggtattaaatgttgcaagattggtaatttgatatccagtgtgagaatctaacatggggtgcctctcttctttgtctatctctattctatttctttttcttttttctttctttttttttttttttgagatggaatcttgcccttgttgcccaggctggagtgcaatggtgcaatctcggctcactaccacctctgcctcccagattcaaacggttctcctgcctcaacctcctgagtagctgggattacaggcgcccgccaccacgccccgctaatttttgtatttttagtaaagacaaggttttgccatgttggccaggttggtctcaaactcctgacctcaagtgatccacctgtctcagcctcccaaagtgctgggattacaggcgttgagccactgcgcctggccctctattctgtttcaatccaactatatgtctggtttgaggaaatagccagggacccacgctgtgattagcccaacaacccaagcagggctgactcctgaagccagagtagtaacaatcagttctggcctggctggtcacggtggctcacgcctgtagtcccagcactttgggcgactgaggaggtggggggggggggcagatcacttgaggtcaggagttcgagaccagccaggccaacatggcaaaaccccatctctactaaagacacacaagaaattggcagggtgttgtgctacacgcctgtaatcccagctactcaggaggttgaggcagaagaatcgcttgaatccaggaggcagaggttgcagtgagccgagatctggccactgcactccagcgtgggtgacagagtgagactccatctcaaaataaataaataaataaataaataggcagggcatggtggctcatgcctatactcccagcactttgggaggccaaggcaggcggatcacgaggtcaggagatcgagaccatcctggctaacgcggtgaaacccggtctatactaaaaataataagattagctgggcatagtggcaggcgcctgtagtcccagctactcgggaggctgagacaggaaaatggcgtgaacccgggaggcggaacttgcagtgagccgagatcgcaccactgcactccagcctgggtgacagagccacactccgtctcaaaaaataaataaataaataaataatcagtcctgacctaatacaacagacatgaatggcaaaaagtttgattgtgcaattttctccataagaggacctgaggcaggtcgtatgcttgctgtctagaaaataatttcaatgtattttggattcatccatactaagcagtttttgctttgttaactgtttcaccttatgagatttttattttgagaacaacgtgtggtgaacgttgggatgtttttttcttcctcctcttttttttcccttctgctttaaaaataagataagcttgcatgcaaatagagttcagggtgaccacagtaacattctcagctttatttactgaattacggagtctcccttcacttgattaagttccatttgcatatctttaacatgagaaacactttattccactttattccattaatgagtcatttgagacatcttcagagtttatagcaatgctgaaagaatggatgtcttctgtatgaaaacttaggggttgttttatgtgcagagaaagagagagacaaatagaggttttttaaaaaaaaaaattctaaaactgaaatgtgctcaaatgaattaaagatatttgaaatatatttatgtatgtatttctagctaaagaaatatatagtataacattctcattctatgaagaaataggctatttccttttgtgctacatataattagttttctttttttttttttttttttttgagatggagtcttgctctgtcacccaggctgcagtgcagtggtgcgatgtcggctcactgcaagctccgcctcccaggttcacgccattctcctgcctcagcctcccgagtagctgggactacaggtgctcaccacctcgcctggctaattttttgtatttttagtagagacggggtttcaccgtgttagccaggatggtcttgatctcctgacctcgtgatccgcccgcctcggcctcccaaagtcctgggattacaggcgtgagccaccgtgcccggccatataattagttttcgaagaagaataataactctatatgtttactatttttatttttttaatttaatttttttttatttgagacggagtcttgctcagttgcccagactggagtgcagtggcacaatctcggctcaccacaacctccacctcctgggttctagcgattctcctgcttcagcctcctgagtagctgggattacaggcgtgcaccaccacacccagctaattcttgtatttttagtagagatggggtttcaccatgttggccagactggtctcgaactgctgaccttgtgatccacctgccttggcctctcaaagtgctgggattacaggcgtgagccaccgcactcggcctattttattattttttattttatttttggagagcaatggcacaatttcggctcactgaaatctcgacctcccgaattcaggcgattcccttgcctcccggagtagctgggactacaagcgcccaccaccacgctcggctaatttttgtatttttattagagacagggtttcaccatgagggccaggctggtcttgaactcctgacctcaagtgatctgccagtctcggcctcccaaagtgctgggaatacaggctgtgagccactgcgcctggcctgaatttttattttttttttttgagatggagtcttgctctgtcgccctggctggagttcagtggcaggatcccagctcactgcaacctccgcctcctgggttcaagcaattctcctgcctcagtctcctgagtagctgggattacaggcatgcgccaccacacccagctaattttttgtatttttggtagagacgggtttcaccatgttggccaggctggtctcgaactcctgacttcaagtgatctgcctgcctcagcctctcaaagtgctgggattataggcatgagccgctgtgcctggctgaatatttttacataggaaaacaaaagagagagaaaaagaaagacaatctcaatgcttttctcagaaagaacaggaagcctcaaggaggaagtaggtgacagtttatttttcaacaagcacacgttatcaagtgaatgaaattcctctggaagctataaaattgaagattggaggatggcagtgttcagatagcatgaaaggttgctcactatttaggaatttttttcaaagctaagttattaatgaaagccaattatttgcacttttccagaaggaaacactgagtcattcatgaaatgatctaagattttgaaacttgcttacaccatttttttcccctcctcctttcttacctgtgccaaaaacagaaaagccaactactcactggggcctaaatccagggagcctgcaccaaattagctcaagactggagtaatttaacagactcgtgatgccccgaaggcttaggtcctaccaggatggtaaactctgaagtgcctccattgcccccgcagggtgcagagcacaggggcctggtccccacctctggagggcctgtgattaactggttctggctcagtaattatttagccatatccctggactgcctccaagtttcaagtcgaacagcaaaagggcgtgggcccgcagataggcagaaccgtgctcctaggaggcattacttatttacagccagatccctacggaatttggccagagatgggatacagatgagaatgtgtttggctaggaaatactgacttcttgatgcatttatggaaagtttgtgagcttaggccagtaaaccatgtcaaaaacacagtcaacaaatgtttgtttcaggaataaactgtgagtgaggtggttttaacctagggacagcttcattctgtttctttcctggtgagactatttctaggtactttttaaaaaacgtacgttgaggcaaattcactaagagtcaaaccactgaagtttctggttaggccatcagtggaagctgcttatttcatcttcacaaacaactgtaagtccatgtagataaataatgtagacaaggaaacaatgttttgatccaaacaatacagaaaagcttggaattgtgcctccttaacgtaacaccttatgtttgcattgttctgttaaaaggattttacagatacattatcttaaaatgacactgcaaggtacagaggggaagttgaatgtcccatttcacagattagacaacggtggctcagagagaccatgaccttccgaaggtcacaaaattagtacattgcaaagtccatgcttaaatccagggcccctggcaagagtgctgagcttgccccttacaaaccggatctgaatgttcccttctgtataccaggactctgtgagcttatgtcctttggttttgcattaaacctgagcttttagctcctagaattcacaaggaatattcaagtctatttccactccctaccttgaagctcctggtctgttttcacaacaggggatgtgcctgtttgagaaggaagtggtctagagtctggtattagtgtaaaatggcttcctctttttctccttgaatttattctggtagtattttatcccaatactcctcccccgcagcaaaaaaatcccaaattctgcaacacaattgaggaacttaaaaaaaaaagaaaagaaaaacctttctcatccactaagatgttactaatgatcaccagtgatttttaattccctttgtatatgtgtgtatttttcagctttttttttaaacaatgatatagggtggggttttctaacatttagggaaaaaattatttttaaaaaatctcattatttttgtgtaattcacatggtgtaattcacacaatgggtggttattactaacaccagtaggaaaaaatatcacaggagcttcatgacaaatccttaggcagggtttaggtctcactaatttagaatatgcctggtaagcactggttaaaaattgatgatcccgggaagtctttctcaaacgatttttgtaaaatacctaggagaccttgaactgtctgttacggaggtttccaatcctgaggagaaggacggagggtggcgttcacgagggatactgcctattactcagcttaaagtccccttggctctgccctcctcctcctcctcgtgctgcgagctgggaggagtcagcgttttctctccctaactggcattttcactaggcagaatacttgtcttttgtgaacgttttcattttcaagacatataaaagaaaactttgttctttagtaagtgattttctcccccgacagggagagggttacaaatccctccctctccagcggagttttcttatctcttatttacagagcagtagccattttggggagggggaaaagttgtcagcaactcacgtcctaataatggcagatatttttcttaagccctcaccatgtcccaagcactctcccaagagttttacatgtattaactcagttaatccttcctagagccttatggtatacgtgctattaggatcccgattttacagaggaagagactgaggaacagaaatgtaaactaacctgccaagatcacacagaggctgggattagctctctgacctctgtcccagaggcagaatttttttctaatctcacgagtataggtgaaagtcagagtctcattacagattgagactgaacagaaagttggaatccattgaaaaagaggtgtgtgacattgatcaaggccagcacttttatttttgcccatttatacttccttaaaaatctatgagccaactctgttgttacaacacaaacatgcagtggttccctagccaggtcaggtcagctagaaaatacaacatacgctcttgaacaactagatttatttcaacccaattttcaatgtttatataattcaattgtaaaatgttaaaacttggaggattttattcaccagctgaaggactcatagttactatctttaaaaacagcagtgaataagcaaactataaactaacaaaaaaaccaagcacaacaaaacaaacagcaaattaggtttaatcataatgcttgggagaatatgtatttggcttaattatattttcttctttttttttttttttttgagatggagtttcgctcttgttgcccaggctggagtgcaatggcacgatctcagctcactgcaatctccgcctcctggattcaagcgattctcctgtctcagcctcataagtagctgggattggccgggtgcagtggctcacacctgtaatcccagcactttgggaggccgaggcaggtggatcacgaggtcaggagttcaaaaccaggctggccaagaaggtgaaaccccgtctctactaaaaatacaaaaaattagccgagtgcagtggcaggcacctgtaatcccagtactcgggaggctgaggcaggagaatcgcttgaactcggagggcggaggttgcagtgagctgagctcgcgccactgcactccagcctggcgacagtgtgagactccatctcaaattaaaaaaaaaaaaagaaaagtagctgggattacaggtgcccgccaccatgcccggctaatttttgcatttttagtagacacagggtttcatcatattggtcaggctggtctcaaactcctgacctcaggtgatccacctgcctccgcctctcaaagtgctgggatttcaggcgtgagccaccgcgcccggccaattatattttctagttactcagctatctacaaataaaggttttgtttcatctttacatattttaaatatgtcttactatatatttatatgtatacataaatatttcttgtactcttttaatatgtaaggaatagttttccatctttaaacatgtttaatatggtaaacatccttttttatgaaacaagattgaatatcaataaactaaaccacaagtagaaaaaactatcatttttcatggagaattcacagttctttaatgctctcattctgaatctgaataatcattcatgatgaaatagaaagcacaaataagttttacccacatggactcttcataacattccctggaggcttcctttttcagaccaaatctttaatatcagttctgtccttatgatttatctcttcctccttcaaaagagaaagtaaaaaaaaaataaaaattaaaggcttttttttttttttgagacggagtctcactttatcgcccaggctggagtgcagtggggcaatcttggctcacttcaacctccaccccctgggttcaagtgattctcctgcctcagcctcccgaatagctgggattacaggcacctgccaccgtgcccggctaatttttttatttttagtagagacagggttgcaccatcttggccaggctggtcttgaactcctgacctcgtaatccacccaccttggcctcccaaaatgctaggattacaggcatgagccaccgcgcctggcctaaagtctcagtttttatacatacacacacacatattttttaatgtggcacacactatatagaatattgcagtgcaattttaatgagaaagaaaaatgatctttgagacacaactgaaattgaagtacacagaacttatattgttcattaaaacttgtctttattatacagtttctaaacactgaaggacacaggcaaaagctatgaccagtataaatttaattaagctttccattctgtgtatgatgaaaagaaccgaagtctgtcattttaaagtgaactccatgtaaatcccaagagaaaagtgtaaatgattttattgtatgaaaaagttcagtgaactttgaaattcttattgagcataatagacttatactgatcaaaccaggccaggtgaagtgactcacacctgtaatcccagcactttgggaggccaaggtgtgaggatcacttgagcccaggagtttgagaccagcctgggcaacaaaatggcaccccatctctattaaaaaaaaaaaaattaaaaattagctgaatgtggtggtgcacacttgtggtcccagctacacaggaggctaagggcaggaggcttgcttcagccaaagacgtcaaggctgcagtgagctatgatcgcaccactgcactccagactgggcaaaagagtgagcccctgtgtctaaataaataaataaataaataagaaaaagccaaaccccatgatgcaaaagattttgccaatccccctgcaccaagaagtggtgttccctcaccacaaacagaagatgtttcattcagggaatccttcactaaaggaagacatagtaagccaatgcagccaaaaaaatcatctatgcaaagtccatggctgtcttctatctttagcattacagatctcagaatcaaatagatagaggctgagtggggtggtttatatctgtaatcccagcattctgggaggccaaggtgggaggatcatttgaggccaggagttgaagaccagcctgggcaaaatagcaagaccccatctctattacacttattattatttttttttgtcatttttttttttaatttttgtggagaacggggcctcagtatattgcccaggcaagtctcgatctcctgggctaaagctatcctcctgcctctgcctccctgagagctgggattacaggcatgagccattgtgcccagccttgaggggagttacagttctttttttggtctttttttttttttatctctattaaaaataaataaggctgggcgcagtggctcacgcctgtaatcctagcagtctgggaggccgaggtgggtggatcacctgaggtcaggaattcaagaccaacatggtgaaatcccgtctctactaaaaatacaaaaaattccccaggcgtggtggcacatgcctgtagtcctagctacttgggaggctgagcaggagaattgcttgaacctgggaggcggaggttgcagtgagtcgagatcgcgctattgcactgcagtctgggcaacaagagcgaaactctgtctcaaaaataaatacataaataaaaataaataaaaaacaaatagatatagaaagaggtttatgacatgactgatctgtaatctgagaaaaatcctatcagtgtgcaatacatgaaaatcttaccctgggccgggcgctgtggctcatgcctgtaatcccagcactttgggaggccgaggtgggtggatcatgaggtcaagagattgagaccatcctggctaacacggtgaaaccccgtctctactaaaaatacaaaaaaattagccgggcgtagtggcggcacctgtggtctcagctaactcaggaggctgaggcaggagaatggcgtgaacccgggaggcagagcttgcagtgagctgagatcgcaccactgccctccagcctgggcaacagagctagagagagagactctgtctcaaaaaagaaaagaaaagaaaagaaaacttgcgtagtgtttgcaagtcagcttctccttggcacaggaaatagaatacccgaggcccatgataattttaggggcccacaaaaatatttttattttaatttattttaaggacagaagagaacatgaataatattcatatatatagtaatataaagcattcatatataatatatagtaatgaatccagcctgaattatatttcctcttcaggccaatgtagtcataaaatataatttttcatatccttttatggaggaaggggtccacaaaggcaaatatatctcaggcccttaagagtcatgattgggctgtgtatgctatggaaacctgtaaggagcttggaggtggagggagtttggatgaggcttctaggtaggagggacccattgagtggagacctgaagggagaatagaaatcaactacgctaaaggcagggcagaggccaggcataatggttcacgcctataatcccaatactttcagagtccaaggcaggtggattacttgagatcaggagttcgagactagcatggacaacatggcgaaaccccatctccactaaaaattaggcaggcatggtggcatgtgcctgaaatcccagctacgtgggaggctgaggcaggagaatcgcttgaaccagggaggcggaggctgcagtgagccaagatcgtaccacagcactccagcctgggcaacagagcgagactccatctcaaaaaaagataatattaataataaataaataaaaaataaaggcacgacagggaggaatgaacactgagaaggtagaacaaggaagagttttcttttttttttttcttttgagacagagtcctactctgtcatccaggctggagtgtagtggcgcaatctcggctcactgcaacctccgactcccaggttcaagcgattctcctgcctcagcctcccgagcagctgggattacaggtgcaccaccatgcctggctaatttttttgtatttttagtagagacgggatttctccatgttggtcaggctggtctccaactcctgacctcaggtgatccacccgcctcggcctcccaaagtactgggattacaggcgtgagccacctcacccggccaggaagagttttctaagtagagggaacaggatgtgcaaagcccctggggtaggaagaaacaggaacatttgaagaactaaaagaagaaagtaacactggttagagaaactgcagccaggggaagaatagtgtgaaaagaaacagaagccagtcaatgctgggcttatagacaatgggaaaatatgttctgtttttttctctcctttgcctgatctctagtttgcttacaaaaggaaataaagatttccttttattggtttgcaaattgtacatgagtatctactttatcttttttttttttttttttttttttttgagacagagtttcgctcttattgcccaggctggagtgcaatggtgcgatctcggctcaccgcaacctccgcctcctgggttcaagtgattctcctgcctcaggctcccaagtaactgggattacaggcatgcaccaccacgcccggctaattttgtatttttagtagagacggagtttctccatgttggtcaggctgttctcgaactcccagcctcaggtgatccacccacctcagcctcgcaaagttctgggattacaggcgtgagccacctcgccaggctagttattatctttttctttctttcttttttttgagaaaagatctcactgtgttgcccaaggtggactacagtggcatgaacatggcacactgcagccttgacctcctaggctcaagcgatcctcctgcctcagcctcccaaactgctaggattacaggcatgaaccaccacacctggccagttattatctttttagtgctaataaccatctaggttttggttgtttgttaggatttggagatatctctgaaaaaagaaggaagaaagcattcatgtttcttcatatagaatgaaccaatttataaaaaaaagaaatgaaccaacttctttgtctttcagaagttttcttagatactgag

SEQ ID NO: 245 - DNA, 31737 bp, Homo sapiens
aggtgtaattagagactgagacccataaaatgaggggcaaggagctaattactcttgtcggtaaccagctgtggccataagtaaccctgttttgacccaattaatagtaaatccaatttttaatcctacagacagttgatggtgcactcgtagctgcaaaatgaaggacattaaatttggctgtgacattgagtggttacacagaagacctgcttctacaacatttggaaacattgtgaaacattactattcagttgctatttttccatctcaaaatatttttttttagttgctgctcacttatggccacagaacagtccctttttgagtaaagcagcaaggttgcttaatgacatgctatgtggttaacaagattcaactgccacatcaaggactttaaataatttcaagattttaaatgtatttatgaaatgaactcattacagcagctaatcaatgcaaactttgtcctttttctttgtctttctaagagaaactgaatttaatttaaatttaaattacagtgtctaaaacttggtaaaatattttaaatttgaataagaggaaaaaaaaaacatgaatttatttatgatggagcttcatacccaggacagtagcttcttaaatgttagtaaaataattatgttaagcattaaaacaattttgaatatgtaattaagcatttatgttaaaaaacatgtttcttacgtgtgtgtgtatatatttataactgacacatgtgattctttgtacagtatttagaatccttcccttcagatagcagtcctcttgtattcagtcttgtggctaaaatagatcaaaaacatattttaaaactgttaaagtaactgtatgactcatgcttgaagttctgaaatttgggagcgttatgaggtttccatgccattaaccgctagatcatttgcattctctcacagagtaaacggaaaaaaatttagaaaacttgtaataatcctgacttctttaataaaatgtgtcctgtgtattgcttaaatccatagtccagccttttctgagttcttgagccatgagatggaggtggcctgtgtaatctactatttttagaaagttaggaaagcaaaccaaatactctctgagaggaccctatgaaatggctgtacccttcagctgtgctgcttcagactttggccaggctcccaggtgacttacgttaatagcagacttctagttagaagaggagaatttatttcattaaaaaaaaaaaaaataagtcaaacagttcaagaaagtattcatttatgtaaaagaagtcaattggtatgttactaaagataataggaagaaaattagctcactattttagttgcatactgatgattttaaggtttaaataattagatttaaatataccgtatgtaaatgtagaagtctgtatcgtaataaatctgttgctaagtaaaatgggaatacatgacaacgaggaatgtaggtattaagaatgtcagaattagaacgagaacagtaaaagagcaaaagctgtaataatgtgtgctagtatataaacaatactctaaatacttagtttctctaattttccttttacaattgcagttttaatttataatagtctaagagcgtattcaagctgagacttaaattgcttacgtgctatagatttaggtgtattagctatttcagaaatccagaacatttgcaaaggtgcattattttatgccaaagaggattatgttcccctatggcttgtgaaagagataggaaaaaagaaaagaaaaatattaacactgcaagccaccattagaaaattatatttcaaaaatgatgtttcaaatcaatgacaaattgcctattcagtcatgagctctcaactaaaatttggggagtcaatgtaaagaaagcctacagaatgtattttaatatttgccaagttatttataccctcaaaaaaaaagcttttacgatatgatcaacagaaatagacttattgtttactgaattctatttcaaatacccattcatttttcaggtactagggatgggagaaagagaatataacctttatatttactatctattttccaaaaatctagcaaaattcttttacctttgaaaactttagtcacttgttcctttatcaaattgagccattttatttaagataattaaaatttctttttgctatatacagtgatatctatctataaatagcaccccgatcagatttatcatagacacatttgagatcagattccactgcaaagtggcatacaatcaagggtgctgagaacagttttaaagagcctctgcaggcttagcagaatatatgaagtatggaaattaggtattagaaggcacacaaatatatgtacatacaggtaaatgaacaactaaagcactcaaaatcagtaaggcaaacaagtatccagatggtcacatatggattggatggcataactagacatgataaagtagtcccaaaggtggttatagttaaattttagaagatcctctgttgctagcatggtttatcctcaatccagaaattgcctgtgttgctgctgttctaagccccaagcatagacttttcatcatattttaaaaaccagtttcactgataatcctgataaaatatctgcaagttttagactaaatatgcaattttcaattaaaattttgatctattagggtcctaactggaatcactgttaccaggaagtttttttgtggtttgatttttaaccactggtatctcccatgtattaaaactttgacagattattatatatactgtgctggcacatatattcaatgtgtctttcagtgacagattgacatatcacttccttgttttctcctaataacttaggagatgaactaactataaggcataacctgcgcagcagtatgtttcatataaaaggtccctaaggagaaacttcacaactttgtaaagaatatcctgtgaatatgctgcagtgtcatcaactctgacataaacctttctttaatgaaattctcaatagctgcagttgctttggtgaaactagtaattgtattcatttgcctgtttatattagaacttttttagaaaacttttttttatgagtaaaggtttttttagactattagataaattgtaaaccatgtttcgaatcaagctacctgctgcagtaattctagaactatttattttgcttcatattataagattttggtacactgcgtctactttttttctcatgaaatcttgcttcactgtgtgagtgtgacaaactaaaaacaatttagacctcaagcaatgtggcacttacagctgaattcagtttcattgtaattcagatgtctgaagctaatcaaaattccacggagtacccttgaaacaattgcatatataaggctgtttctcacttaaaagagacaatgcagtgtggggtgaattgtcttttgaagaactgtatgacacatgcccagttcaggtgaaaggtgagaaatggaatgtttctcagacctagcacagacacctagggacctagtttgggaagcttatcttgtcattttccttgccaaggataagtagaggatttcagctatcaacattgctaatccgttacctttcatgctgagcaatgtctctgccttcccacagacttagacaaagcttcttattttcttacaaagaggtcctattgaggaaatttgaattttttttttttttttaaacttagcagtactacatcctgtgcttttagataggtgagcaattttccatgttaacagctaggccaaaaatcatgactgccagtagaagtgggtaactagatagatagatagatggcctttgatttagcactgatgatagttattagcatgtagcaacttaagtaaaagcaactggaaaggcttgatagaaattctgagttgtttgaagtataatagattattaggatagtaatttctttgtgaattttactgtaaacaagcttgattctagtgaggacttatgctaattgctcacttatactaacagcaactacagagtttttatttaatactgtttcttatacaaatatcatcaaatgcacatctacctacagcatcatccctacatttttggcacatgtttgaaatattttcactttgagataaagtttgatttttttgctagcgataaaactttctatgctatgagcttgtgttttgaaaattactgataattactaaacagtataacccctgatatcttctaatttggttgacaggctgtttgtcctctggattcctgagggccttggccatctctgaccattacatttcttcttttgttatctctgagttctttccagctttctaattgtccatctttagaactattggttccgatcttaaatatgtctttccatagtcacacagaagtgatttagacattttgtctgtgaagaattagattcagctttgcataacagagacacctcccctaccctccccagcatttggtataaacaaattaggggtttatatttcagtcgtctaggtctatttggcgactctatagtcattggaactcaggttccttctctcttagttcctaaggagcacatggcttccaactttaggattatttcaaaattgcaatgtggccactgcagtgccagccatcatatccttagtctagcaggacgcagaaaaggcaagacaccataactcagcccagccaggctccttttaagcaaaggttctctgagcttcagccagtaatttttcagtctcttattgactgattttggtagcagggattgctaggaagtatttttttgtatgtttgtttgttttgttttgtttttatttattattattttaaaaaactgttgccttgattgaaatcaggagtctggtaggtaagacagaaggggagaatggaaatggatgttcaggagggccatttctggaataaaagagtgtttatttttcctctcataaaactttcagaattaagtaaatctctctggaaagcatctgggtaagggaggtggttgaagagataccacttttgaagagaaactgaagtcttctcatcttgacaaacttgtcatcacttctgtcttgcttatttagtaaataaaacctggcatatcacaaatggatttatttttccttatagagaaaactaaaacagcttcattttttatcttcttataactgtacttatttatttatttatttgagacagagtcttactctgttgtccaggcttgagtgcagtggtgtgatctcggctcattgtaaccttcgcctcccacgttcaagcaattctcctgcctcaacctcccgagtagctggtcctacaggcgtgtatcaccatgcccagctaatttttgcatttttagtagagacagggtttcaccgtgttggccaggctggcttgaactcttgacctcaggtgatcagcccgccttggccttccaaagtgctgggattacaggcgtgagtcaccgcgcccagcctactattcatatttatataaacagtcacatttttataactggaatatagcagaaatgccatgtcattaaaaacaggtcccaagtgattttatatgacaaaagaatctgcactttgatttgtatttctgctgcttccacaaatacactttcttattttttccgtatggagtaaaataacaaggtgagttaatatttattgaaacttaatgtatgtcaatcagtgttttcagtgcttttcatttttttcatagtattttgtccctataaaatctcatcgagatagttactggtgttacttccatttcacagatggacacactgaaatacagagaagttaggtaatacatgcaaggtcagtcagccagtaaaatgtggacttggagcctcgtaatctgatttcacagcctgtactcttaattgttttgttatgtttgctggaaaacattgcttcttaatttccatatgcatattctaaggattcgacaaagaaaatataactaacagcagtacttaagaataaaaatgaatatccaagacaaatttatagtacagggcctaaaacagtaagtactcagaagtaatcactgtattttaagtcaacaaatgagtcaaggagtgaacccaaaatagcagaaagaatgctgccaccaactttcaaagatgttgtatctgttgtaaaatatatggccatataggaaaaattttaaatgaatcatcttagataactagtcactgtataaactatatagctgcctccccagtgcataaaaagccatattcaaaaggtttaattgtttagaaaatgtttttccacagaagcaaggtgattaagtcatcgggtcaaccctgagaagccaaagtagcccagaggatgcttgagttatagttcagtacaaacagtaccttggaaaccctggttattaattaaacccaagaggctccatagaagtgttatcttatcataaatcttgagaactcctagagtcacagaccccagctgcttttgtcaaactatttctgtggcaaagatgtattttaaatttcagtttagggttccagaaattcagcttgcctagtgcaggggaggtggcctttcccaaagtcctggaactcatgctgtgagccagtgtagttttccccagctttaactttgggctgcttctgtttcctgaagctagtctttaatagggcatttgcttagaatcagcaggatctaaagacagggtatgcagtgaggagctggagtccaaagcttcccacctgtgtaacctttagggtgggaaggtgtcgtcaatatgtcttccaagtgacccccatgtttctaaggactcagcctgcctgttttttgaatgtagtgctcattgatcctgggccctgtctactgcagagcttaatgaacagcttctccccattcttccccctctctgaaattttcagctgtgtggttgttgctgttgttttctaaatactagtagccatggggaaacaggtagatcataaaagtatcaaactcaatttttgttttgttttgtttttttttttggcattttatcataggatatggtcaagagaccggttgtaaaaactcagatgtgaggaagaaaaccattaggaggtgataaggattcaacaatttaagtaatataacttatgtacttcctatgtcaaactttagggaggcagatgttaacaatacagtcctcaaggagccggttactaacagggagactagtatattaggtggtggcggcaatggttaggagggggaagtttctcgacagcaattgcagggtcagtgaaagagatacttgaggaagagagaaagaaatggctctggtggtttatctttcctttttccccttccctctctctcacactattaattatgacatcacaagtgggaataaaagaactagagggaatccccagtaaaagacttcacatagccacaggccaccagactgtggcagctgtccctgaatcatcatgggtcagttggtaacgacctgtattttaaccctagatcacaattttaggcccagcaaaattgttctgaagctgtctagatttattaagctatatttatattttagtttatgttaatatgaggttgagatccaagaccctgttttctccagacctcatatgagtacagtatcttaagttagaatttatctctctgcataaaaatcagacctagtgcgtaggcttctggatctcagaatcacttatacttaagtccaggctgttctcaaataaggcaagaagcatctgctgttaatagctgacagtaaattacacaaagtaaaacatggaaaattaaagtcagaaaagctaggaagcttttctatcattttcaattttctgcaaaaatacagacataatcagtgtttaggatctgcttgtgatggataaattacatctgtaattccttcttttccatattactgcattcagacgataatttgctttcagatatctttgctcatctaatcgttcatagactggaaataagtagtaacatctcccaatcctaggaagcatttataactagtctttgcctttttgggtgttgatagactagtggtgattataagctttcgagcttctgaaaagcacaacgaagattaaaataatcataggataataaaatactttaaaacccttctagtctttaattttaaaatgttccagtagaacacaaatttgctcaggtaacacacaagtaagcattaaatgccttcctgtgtatctgagaagtttgttatgaaatattttggaaaccgctgcatagtcagtgtaggaggagcagatgaattttagctgtggttatgtgtgctgtaaaagactatacgtgcttgtattagtcagaatgagtacaccactaatttttgtatggtaagagatttatactaagctcatcatcagtttctataattcagtgagataaaactgagtcagattgatttttaggtagcacatgtagaaacagctaattttattcccctgatttgatcctcatctattgattatataaactaaagaagctaagaacaattaacccttacgaggttacacagtcaggagatgctgaactgagattcagtgtagaaagtctgtcttcagagcctatgcttttagtctttatgctaagtttaacttgtttaaatagcaagattatgaagcactatacagtgacctcgtatagacaaaaatatagtatattgattattagagaaactacatattagactgttgtacatacgtgggcaagtatttgttaaatcatttcagttgcctaaatttaagcaactgtgctgtttaaaacatgctcattcacattttttcttaatctagaaagtcacttctgaataattgcttgtttagattttctcatttggtgtgggaaatttatattaaaattttaactaatattctaacaatacagagtctgaacctaaagtccagaagaattttaagtcatgccgcagacaggatgaacagtatagcaaatcagaataatagactgtttgggggggttggggggaacccatgagaatttcaggatttcaagataaagcttggaattgaggtaaaggcatcagataaggaagtgtttcatttcataactttttttttgcttgaaatataatatattttaaatcacaaaagtagtataactgttatttttctaatgcacagaaccatgagactttttttttttttttttttttttttgagacagagtcccactctgtcgctcaggctggagtgtggtggtgccatctcagcttactgcaacctccgcctcctgggttcaagcgattctcctgcctcagcctcctgagtagctgggattacaggcatgcaccaccatgcccagctaatttttgtatttttactagaggtggggtttcaccatgttggtcaggctggtatcaaactcctgacctcgtgatccgtctgccttggtctcccaaagtgctgggattacaggcgtgagccactgcgcccagctcaaggcattattttataagaggctgagattttattcatcttactaggcatttatttatattatattgtttctaatatatgcctagtaagacagaaatatgcttaaaaacctttgtaaatctttacaagttgtactatattaagttaaaatccagatgaaaccattcaccacctctttgacaatgattcatatatcttattgtatgtcatgcttgtttgtgattttgagtattacatttcagaaattttctaggactaaaatttcagtagtttattttaattttttgtttatttgtaataattatcaataatgctgaaatatttagatctagtaggtagaatttttttcatgtgaatacattaattttaatgatgtatttaaaaatagctcacactattctttttaagacttttgttatatgtaattggacaaaaatttgaccatgtaaatataagaatcgttgattctattttgttcatgatatggcataaagagcatgtttgctctcaaaaaacatgggtttgagaagatgaaatttctgggcatactgggtatttagtagctatcagattgtaatcctgaactcttaagagatgtatctcggatgggcgcggtggctcacgcctgtaatcccagcactttgggaggccgaggcgggcggatcacgaggtcaggagatcgagaccatcccggctaaaaacggtgaaaccccgtctctactaaaaatacaaaaaaattagccgggcgtagtggcgggcgcctgtagtcccagctacttgggaggctgaggcgggagaatggcgtgaacccgggaggcggagcttgcagtgagccgagatcccgccactgcactccagcctgggcgacagagcgagactccgtctcaaaaaaaaaaaaaaaaaaaaagagatgtatctcaaatattagaattgatcatgttatttaaaatactccatgggaaatataattatttttatggaacagttcatttggatgaatggtagcttgaacagaaactttcgataccaatagctagtgttataagtgtcctttcctgaaactcttgccacgcattgtgttttggcgattttcatggttgtacgaatttagtcagacagccaattagaaatatatttttagaaaattaaaaatgaatttatgtggattcaatgagatcagttgggtaaatcccttaattcagtgtcatgctcatgtaaatactccataaatggtagccattagtattgattgttcttatctgaatgccagagtttagtctaagttatctttcttcttatgggaggaactttgtcttaggtcagaataaagattgttatatagattcaaacttggtatgtaattcaaacttattttatgttcaagactaaattgatcatagggaaaagtgactggtgttccttgtcctttcatttcatttctctggacgctttcttcattggtttacattagctatagtgtaactttttattgtgttttggtattttctgagtgtctagattggcctgtatgctcttttctttgggatgaaatttgtaataaaaattattttgtagcaaataaatactggcgacaggaataatgacaatgtgactaccagtggttttcacttcattcccagtgtcacgtttagaattttcatcaaactaggatcttcagaataattgcaaaaagccacatgaaaaaatgtgcaagtgaaaacttttttttttttttgagacggagtctcgccctttcacccaggctggagtgcaatggcacgatctcggctcactgcaacctccacctcctgggttcaagcgattctcctgcctcagcctcctgagtagctggaattacaggcgtgcaccaccacacctggctgatttttttttatctttaatagagacagggtttcaccatgttggccaggctggtctcaaactcctgaccttgttgtctgcctgcctcggcctcccaaagtgctgggattacaggtgtgagccaccgcgcccggccaacattttattttttatggcaaagaatcaagactttgttaagagcctaaaccgtggattcagctggatctgagtttgataccatagtgacttcctagtgacattgtgccaatcactttactgtcccaagctggtttccttatctgtaaaacaagtctagtatcatttgctttcaagatttgtgaggattcaatgagatcagttagatataaatcatttaatgtagtgtcttactccatgtaaatactccatagatactaacggtagccgtttgtattgttcttatctgaatgacagagttcagtctaagttatctttctcttatgggagaaactttgccttaggtcatagtgaatgttatttgtcattatgcacattgcactacaggtctctgtgttgtttgaaaaaattaaaaaggacttaaccttgaatgtatataagtgtgcacatactagcttatttatttacctgttatcaagagaaaataaccccttaacctcttaacatatgtatgacttgactactagctaaaccagtaggtattaatggaataattcagaatttatattgtctgtacctgaaaattcattttgtaaatgcagttaagtatgaatggaaaaatggttgtagccatctgttagcaaatctaaattcatttaaaactaatcctatttagctttatgctggtctacaataaataattcatacttgatatttcaaatgctgtattatttatgtaaattttctcctaaaagactcacctaagacttttctagaaataaaattgtttattcagcaaagtacctgcacagattagaaggttaaatattaaagtttattttttcatgattgcactattcttttctatttttttatacctatataaacttaattggtcaaatatctaccactcacttcctcaaatgtgtaaagaagcatccaaatccataatactctgtttatcacagctttttttttttccccctttcactgtcactcagaatcgatagggatccaattctagcctgttgaaatggtccgttttgctccaagactttttttttttttttgaggtgggagtttagctcttgttgcccaggctggagtacaatagcgtgatcttggctcaccgcagcctccacctcccgggttgaagcgattctcctgcctcagcctcccaagtagctaggattacaggcatgtgctaccacgcccggctaattttgtatttttagtagagacagagtttctccttgttggtcaggctggtcttgaacttccaacctcaggcgatccgcctgtctcagcctcccaaagtgctgagattataggtgtgagccaccatgcctggcctagctccaaaattttaaaaagcatttgcctcatttatgagtttgagacttttaacatcattagaaataggagagcatgtactttttccagcaagtgtaaagggggaaacaaacaccaaaaccccatctccctgatttttttggcttttcagaaataatacagcctagtcctatggccagttctgggtttttcttgacagcgtctgtaactgttcttgttatagtctaattctgggtatgagttatgtgtttacagtttgatttactgagccatgccactgcattcttgttaaggttattgattattgcccattctgttctgctgtgtattattgatttagtgtgtgacaatgagttaattgtattacttgatgttgaagaaggatcaaatatctgttcaaaggggatgcttgtagcctgtgtaattgagttggctatttcaggcttttaacatgttgtgaaacaattaggagaaagtacaggaggacctctgagggcagggaacataaaatttgttttcagctttttcgcagttgccaaaaatggtgccgtaaggctttcctggaattaagtagtcagttggtatttggttagcagatgctttgtaaaacctaatatattcccactatatttcctttaaaaatcaagggggggttaacacctttagattgtcatgttttattgagaaaaatccacttctctgaaactccctattactggatataagaaaaaataacaagcaagatgtgttgtgtatgttggtgcccacattttggaggaaattacagagatagaaaattaagctaaattattaagaatctgatgagttctttttgcttactacagttttgtttcgtatttgataaaaaaatttccatgtaataacatttaagataaagccagtattattttctttgacattattttgcagtttgaattttctaagctttagacaattcacacttaatgtaaaaaaaaaaattaaccttcagaatgagatcatggtgccatggttctctaatgaatgttaccttttgttttagcagctcagttggctctaatccatggaaaagtttttatttcccatcagctccaaagtaggagccaaaccaaagtttaaagaaacgttttccagcagacaagtttctacagataatagtgaaagcgtgtgaacacacacacacacacacacactctctctctctctctctctcactcctctctctctcacacacatatgcgcgcgcacacacccacacgtcttatggaaatattaaatcaggaagaatttctgaagttctcataataaaaataactgtaatattaataaagtactccttatcagttatttctcgtcacattgtggccccaagggtttgcttgacttttcaaaatgtatttgcttcaggataaattgaagaagtaccactctctccctgtattaatacctttcagggcttttgatctgtaacctcttgtcacctctggtttatctggcttagcatatgaattttgaagaatgagggagcataaacaattatgactgccttttaaaaaatgcacgttaaacctgcggcctcaaacttgtcagttctgaactttaacagtagaaaagtgaaaactcagcgttgaaagtagagagtgtaagagattttgccagttggaccactttgctgcaaatacctattagacccaaacctttcttttgcctagtgatcagctatactaatagcaagatccacttaattccatgtgagtcaacagcttgcatggcatgcccactgtgtgcaaatagcttctcaggtacttttccaagcgtcctgcctgcacaaagcagaagagacttggaatatatttatttattctctcaccccactgcttgctctatcacctagaccttcatgctccatcacctagtcctgcttgctccatcacctagttggaatttctaaatcaacagacatgggcagatatatattttaaaagctgtgtgcctctgattaacaaccattcctttaatactgctgagaggttctgggaacatagtatttttgccatgacttctcaatctatagagaagatgtatttatctcctaaggataaaaccatctggaaattttcacatgctccagactttcagatagagctggctttgccttctctttttcttcctcctcttccttctttttcttcttttatttatttatttattttgctttgcttattaaaactatggatgaatttttaaaaagattaagaagataaaataaccttctcacctgcttagtaatttcttattcatagttagaaggtacagtaactgtttcataactgtccccattaaatttctgattcaaaaaatatatatttttctttataaataccgtttcctatgatttttggtccctaaaaagcaaacaaaaaaaagctacttgatggtaccttggttgtagttagcaggtctccattttctacagatcttccattctgctttattaacttcctttattaatgacaaatcagccagttgataaaataatgtgttaacttttaaaagattcttataaatttatgtggagttctgtgactacctgatatgactttgtgactattttagttgtataaagaatttcaaattatttattcctttaaaaaaatttttttttcagagacagtctcactgtcactcaggctggagtgcagtggcgcaatcttagctcactgcaacttccacttcctgggtttaagtgattctcccgcctcaatctcctgagtatctgggattacaggcatgcaccaccatgccgggctaatttttgtattttttgtatagatgaggtttcagcatgttacccaggctggccttgaaatcctgagctcaagcgatccacccaccttggcctctgaaagtgttgggattacaggcgtgagccaccgtgcctggcctattttttgttttatttttttaatcttgaaataactccacagttatctccaagtaagtctaatatcttctctttgaatttctaactgattcttatttataaacccatagaatctgtaaacccacaaacaaatgattcttcatcgatcaagttctgttttcaaatagatgttcaacgagatgttcaaaaagacgataaaggatacattgtaacctaaggactttatttcgttcatttggtcatttaccttttaattgtagtggacttaaatgtatacagattttcatgtacaacaagtagtatcctttagctgcaacaaatgaatagattagcctatgtgaatatagttttgcaaaatattaatgtatgaaagtagtcctaagactgcaagtactgttgctttagaacttcatgcataaattgggtgtgttgttacaggatacagagaaaattgatggtcaaccttagcctgtagtatattttgacagtgtgaatgagtcaagcaagcaattttccagactgtttaatggtacaaaggaaagggctgctaaggaagtcattcttatgactagctgaaaaatatttttcttagtgactgttctagagaaaaacaggtcaccgttggaagaaaaaagcagtctcacgttacaagcattttgaaagtggtttgatcattaaaatgtatttatcttacgacaaaacttaaaacggatactgcttactatatttgcaatgtcttgaaactcaacaagaaattatgtagcatcattacaagttttaattcatggtagaattttggagattatatttattgagctatgttttttatttcattagtacaaataaaactgcattttatttgttctaatgataaaatgttttaagtttataaaattactgcaaatgtattccactgtgtggttctaaactgcatttgaattaaaataggacttgattgatggagaatcatttgtttgtgggtttacagattctcttctaggtagtttgaaaagattcattgtccagcagcaactgttcacccagagacatagtgcttagcatgagcttgatggattcaaaccactgggtttatcattactacatagatctttgaaaagacaggctgcaaatcttgtttctaagctgtgactagctattattatgtcaatttgaagaacagaagtaaaatcaatccagattcaaaaaaagacactctacaggcattcacagactgcaaccagttcaaattgtaatatcctgcctatttaaagtcccctgattattatgattattcaatatcatgttaatatttaaaacttggaatacaacctactaaccttatttttatttgtactactggaagttcctctagcatttttgaagtagcttggaaaaaaattgagattcagttgtggttctacttacatttttactagagtaagttggagagacaaatcagtgagtagtcaagtcttcatataatcaaagcttttaaaatatgataacaaaaacttcaggtgttagatttagcttcacggaaaacctttttttggggggcctaagtttaaaatgtgttttttctttgcattttaaaagattgcttgtgcagtgttcaatggttttgtttagcatttagagatgattttttcctttgtcactttccacattgaactctgctgatttagtgtgttagaattgccatcagaagagtccttagaaatgatgtcatgcagttcattagttttacagatagggaaccaaggagtggtgaggttagggtttaatcatatccataaagatcttgaggtcattaggaccctttaaatgtgactagttaaatcacagcaaaaactagaatatattgtcttcatttcaggaaaatggcatcattgacacacctgacagatgaaaactgctattaaggtcgagtccaagtgacaaaactttcttgactgttctgaggccttggttacggtggcattaaagttctatactgtttttttttttttttttttttttttggctggacaacagactctccaaaaaaatgcatgtgtatacattatgcttattataaaatttactaataaaatgacatggaagacaattaaaattataataaaatatacaatgctcaacatttaaattctatatggccaattgattcttacagaatgcctttttgatttttgtccaactcttgcatctgtagtcaacctgtggtcgcaattgacagaagagtttaattctttctttgtgctcttactcctgggtccctcattgtacagtgatcatcaaatgcaacatccttcatgaaaatgaatagcttcactttttggcatttccttcctttttatgtgtcatagaatacactacattattcttgattttacagttaatttgtaaattgtttctaacccccactagtttataaactccttaagaatgagaagcttgcattaatcacttctatatatatagtgttttgaatatccttggcattcattaaatgtttagtgaattgaatgcgatgtttcttccagactatgaccaataattgtgagaagattttatgtgtttttaaattcaactttagagaatttctttttgtgtaataggacatttgttggacagcaacatgtaattactcataaaatgtttctctgcggagtccagcatccttcatttgtgataggactcatccagttaaattgctcaggcactataatggactatttatgttctgttgatgtaaatttctagaacaggcctttccctggactcatgccatgttttgtatgttatcttgtgcaggcagcacatggggacctagtcaggcttcctgatatgatagctgtatatacagcccatgtctcagaggggaatgataaattggcctgtgcagtgacacaatacacagttattttggtgacagtattaactctcttttcataagggtgctttgttggaaaactattcagcttaacacagaatatttagctttcaaaggttgcatagggagaaatgatactgccaggatagaaacattatcagttttttctttctttttttttttttttaatcttttttgactctaccgagaatattgaaaagagttttgattagtattggtgtttattacgagaggaacattctgggaaccagactattagtataattattattgtttttattatcaaactaatagcactaacaaggacatacggtatttgtcaagggattcctatatctctgttacacctaaatttctctatactctaattttagaaaaaaagttttgtcttccaactgtgaatactttatagtgttgcaacttctgcttctaatctttaatctgaagtagaaaagagaatccaagcttccaagaagtatgtctctagactctgccacttattaacttgctccttattttttctctccaacaattattttaagatctgtatgatataagctatttttagaagaactgaaaagttctagagagtaaaaaaatgttccagattgtgtgttggtgccagtagtactgacaattaaatatttgattgaggagaaacctacatttatccactttgaagaggatcatcaggggagttaaaaatttagtacttcaggctcattaagagttagaatagagtaattatgtagctggtaacaaatgctacaatcaccacttgagcattgtgatatgttactcattgagacttactggccttcttcagggaacttcagattttataaaagtcatttgcttagagagtaaagttctgctaatccattattttagttctgtcatctttttctgcaaatagggtgagttttccgagagggtaagtccctggtaataatcttaaaaatgatacaactttacagaatatctccccttgccatgaagcaatacttaatgtcttgaacagtgagcctcttgttcatgcagcatttaaaagagatgagtgtagaggtcttccttctacattcattttattcgttagtaattgagaagcaggtctaattttctaatcttgcaagttgggaaattattaaaatgctcaagagacagtagatcaagcctggtgtccctttctccatcaaattttaaaggatttttttttcctcagtaattctgcctttgtgtatttccaatcttgcttcctatttgcattgcacacagtggcatgtcaatttcaaaagaaaatgtattcagatctactttcaaactaactgaaagagatagtggtatttattttatcctgaggttttgttgttgttgttatggttgttctttgttttttaaatctggacatatcagtaatctcctaagagaatctattccaaacacagagactgtttattcttgttttagatactgttttaaaagccaggttatgttattatagtatagatattttaaaaaataatgaaaacagagtttttttaaccatatttttgtactgcataaaaatgcagtgacaagagaaaaacattagaactctgtcatactcctaatatagaccattgctgttaggtttctaactccatgttccctgtctggaagctttataaggccgtgccttagtcttcttaagcctaacacattgtagccttccaataaatattactttatttgtattaaatttaaaatggaatagaatgtggtacatcaccagcgttcatagctcctgacccatgccataactttccttgccccatccccaagattaaaaaaacacaaactattagactaattatagtcattacagttgtaaattaggtcatgcatttcattaaaaattgacgcagctccctttttgaaaggctatgtcacggaaatgcaaactagccttgtatatagaacactaaaatcatttaacttgaattattctaattacgataccacaaagattaaaaaatacatctatattatctcagtctgataactgggctgggaaaaaatgtcagttttgatatgtaacaagattggtatgagttattttacgtgacagttttattgattgatttttttcatttataatcactaattttgtgaggttttctcccctgcagcagtggactgaaaaagttaacatttttctggcattttttaagcgctaagagtagaaatcaatagttaaattgacctaataaaagatctgtgcatcctactactgtgacaagaagagcaacagaaagcaacatgtatagactcttaacaaggctcaaggcacattttggatttgttttgcatatgaatttaataagcatgagacagtgctagtgaattacatttgttttattgagtctatttaagccaggatactgttaagtaatagactgacggtttgtgggagccagattcagtaacaggtcagcaacagacttgccacatgccaaaaatggggttatactggtttcagtttgctaactgcctaagtaaacttgtgtagaatttgcattttttgctttgcaattactggttacttctctttaacattacatttgcattctatgtaaaaaatagattttatatttaattcaaaatttatccaaatgtacttactcattggacattatttttaaatgataaaggaacttaaaaaagtgataggatcaatatagtaataattctaactcccttttatacccatataaaattcatttaactagacttattcattcaacaatattgttaaataacctaaaggaatttttttaaagaaatagtgtaaacatacaaatatgaataatttgaactcccttttatataaatatatctgtagtcactaactgtaaataatttaaaaaatatatatgtacacacacgtgcgtgcacacacacacacacgtcatgccttaacaatggggatatattctgtgtgtcattagggtatttcattgttgtgtgtacatcatagagtatacttacacaaacctaaatggtatagcctactacacatctaggctgtatagtacggcctattgctcctaggctgcaaacgtatacagcctgttatcctattgaatactgtaggcagttgtaacataatgttatgtatttgtgtatcaaaacatactcaaacgtagaaaagatattgtgttgtgctatgaggttatgatgtctacaaatgtcactgggtggtaggaatttttcagctccattgtaatcttatgggaccaccatcatatatgtgggtcctttgttgactgaagcgttgttatacagctattgactatagttagtgaaaaaatctagttctatgattggttttgttccctcctttcttatgatcactattcattcaacaccttttatatgacatgcagtttgaaagcacagggtatgcaaaaattatccccgttttcggttgcagtatctgttgctgacccagataacttcatttccttcagctgtgctttcattttcaacttctctagttggaaataaatcctcttgtgttgccccttgagggagaaatcgtttagcaggaaatcacttactaatcacagttcattaatcacatataaagaatactttataaatgtcaactgtcattcatagaaaatgtatgttaccttgaggaatgtctatgaattacttattcattttcattgcctttcacacattatattccttaggagtttattaatttcaaatataaattgactatgacttatacagagtcttgcaaacaagagagatagcagttttgcaccttttctttgatttacttgttatcttcctggtcatgtagttagtctgttaaagtcactctgcctgtatagcttgttgaaggttacaggcagtggagtgctggaactggtttatgtcgagacctcttcccaattccatgttcaatgatgtctttgttgatagcttaaaattggctatggtgagagcgtttacactttggaaattggcagatggcaaccatagttctctcctagacaaccacttattaaacctttagcagcactcactgtttatagtgttctttttcgttttttaaaaatacttttattatgaggaatagccatgtagaattttatttccagatattttgttgtttaaaaccctaagaacatcactcactataccaattgccaactgagtaactgggaaagttacttagcttttctgtgcccaaatgtccttatctgtaagacggggatgataataatagcacgtaccttgggattgatgtgaggttgaataagaaacacatttatttcagtgaatacataatgacctggaatgaatactcaaataatgctacctgttatctctctgtactttaattaatagatatttattgatcccttactaagtacttagcattttgccatgtacagtgggtcatctactgagactcagtacctcccacatcaagttattagccacattgacctgtggcaaatgacttcttttgatgttcccatgtaatgccacatacccgcccccccccgcccgcttttttttcatttgtttttgtttgttttttggtctttctgcctgggactcttttttcttcctacatgagttttgcagaccttttccatgtttatatatggctcatacattccctcctctagaaagcttctcctcactctagacctggccacataactgttttgcctctttgcttatgtagtttggagtatgaatcataataattatgtatcttactccatctctgcatttgattccacagcctacgacttacacctttgtgttcttaacctcttagtaagaaatgcctgacacgtagtagactgactagaagtgtacattgaatgtttgctggttaaaggaatggaacatggacttcactcatagagaccttactatttggttgaagagataatgcatacacatgtgacatgaaggtaaacacaaaatatattgaagatatctgtattttattttttttagtttatagttaatttttacatactatatatttttgtagtaggtaagtcaattattttcatgctacagatatggacatttatgtatttatgtacaaatacattgatttaggttatctaggccagattgtaagtagcaaagccctgtttgtaaaccaggttttgtgacttcaggttagaaatattaaaaaaaaaaaaaaatccttaattgctcttccagatatgaactcattctttttttttttcccctgtgatttctgtcttttttgtttgttaagtttaaaaaatttatggcaatttttaaatgtacataatattagagaaacaatataacaaccccctccatatatctatcagtcagcattttgtatgcatgtatccgtatgtgcatcagccaacattttgccctttttgttacctttcacactccttttacccctgtagcatgttaaaagaagtctcagacatcctatcatgtcacttatacttcttcagtagtatctctgacagttaagaacttattttaaatataactccatttccaaatctatgaaaattgacgacaattttattgtatcatttgatagccactttatgttcaacttttcctgattgtcacagcaatgtccttttttaataggtacgtttttccagttagcatctatggtgtcatttagcttgttcttccatcatccttattttctgtaaactgaaaattagagtcgagtttaactttaatgttatttattattatttggggggaacatttcctggaaggttctgtatactttctatttcatcatatcaagaggacataattttagtaatccctgcttttaatgatgctgcaatctatcagtgaatcagattggcctgggccaatccttataaagttctccatcagacttggatccaatgatttcacctcattgttgatcattttgtagccatgatattttttagagtttgcaaaaatggtgacttttaattatataatttctgctgcgtttattatcaagaatttttttcataaagatcttttcatagtaactaatggtcaacttcaaaacatagtttatatcagaaaaagggaaaaaatgcatgatatttatcaattttcagaatcagatattctcttctaacataagatctaaataagcttacacatataatcaaggatgccagtaaatttttctaaaaaatttttcccttgggaaaattatttatttatttatttatttatttatttatttatttattgagacagagtttcactattgtctcccaggctggagtgcagtggtgcaatcttggctcactgcaacgtctgcctcctgggttcaagtgattctcctggcttagcctcccgagtagctggaattacaggcatgcaccaccatgcccagctaatttttttgtgtgtatttttagtagagatggggtttcatcatattgaccaggctggtcttgaactcctgacctcaaatgatctgcctgccttggcctcccgaagtgctgggattacaggcgtgagccactgcgctcggctgataaattatttgaattgcttctcctaattttttttgattaatatgttttgataacattgttcctatggtaatattatcaaaaaagttttctttccttcctttttgtttatcattaatgtgcctctgtatggttgaatttatttactcagaagatatttattgggcatctgtctttttttatcaagctctgtgctagtccctgaggatgtagatatgagccctgcttttttcttttctttctttctttttttttatttgagacagactctcactctgtcactcaggctgagtgcagtggcatgatcttggctcactgcaaccgccgcctcctaggtttaagtgattctcctgcctcagcctcctaagtaggtgagataacaggcatgggccaccatacccagctaatttttgtatttttggtagagatggggtttcacccatgttggccaggctggtctcaaactcctggcctcaagtgatctgtctgccttggcctcccaaagtgctgggattataggcttaagccactgtgaccggctgcttttttcctagaatatatagtttgggtttcttttccactcgtgatgtgatttaaaaaattgaacctgttgtatatgaatgtggttttgtaaactataatatttggtatcatatactatatttttttctatatatatatatgctactatatagtcatatagtagcatttttttttatagctttctttggagttcttggtcttagtgtctaaaatagtggccataaaggaatttggaagttaagttgttcttgctgacccaaagaaaaatcagatgtttctgtttaggacactgtatgtgacaaacaaggaagtttttattaatttatttttttgaagaagaattgatgagagaataatgagaattcctccaagattaaaagtaaattataagatcctgtgctattttaatgtaagccaacatttgaatttaatttgacttctattttcagtaaattagagtgaaattttagggatgtctttatctcctatagtgtgtgttttgccaagatttattaagggtaattttggattttagaaaatgtacagtttctaaaggcttgtgaacgttttatattgatagaaaatgtaagtaagactagtaacacattattttctccaaaggatcctgtgactgacacaaaaaatatgatataatattgaatctgccaaaagatgcactgttaatctagggttatgttatgttgttattttattaggtatgtgatactatggtgtgaattttagaatataggtaattatttaagtaattactgtaattctaaacatcttctgagatgttttctctaaagcagaaactcagcttttactcatgtttagataatgtgatatagctgttctagatatttgagattagggttgaggcaaattgttgacatataattaaaatgtattttataactaaaatttagaagaatggaaaaagtttacattgtatttataagactttgctaacatgctttatgacattacggagaagtactaggaagaaggagatctttaaaaggagtgatattctgtttgctttgctggagtaccttatcaggaaatttgaaatcttagccctttaattgtgatatctgttaattctaaaacttacactgaatttaactttgaaggtcaacatatggatttttttaaaaacaatatttactctatcaaaagattagttgtatttttgacttgaggaaatagcttaatctgaacagcacgaaacttgacaaaaaagtttgctaatacataaatattggctattttaatctgttgaaaacggaaggctagtaccaagggagacggtagtaaaattatagaaggagctagtgaaaagtaaacattatgcaacatgaaaagaatactaggggaaaaactgacagagtagaataacaggaagattagtcacttctggaaggaaaaaagtaggtaggggcagggggatgaagtactttaaacaggaatgtggaactggaagtgctagggctaaaagacagatgtgagcttatttgggagctaaactgggctttgaaaaaggaataatactggtagcatttaatatcaaaatttaaattttatgttaacaataagaaaaaaatggagaaaaatttttgttagggattataaaatgcctgttaaaataaaaagacttatatttactcctttgtggagctgaattggtttcggtcagacagcaatgtcaaatgcaaatcaagaaaatacatttctgaggccaaggcaggagatttcttgaccccagaaatttgcaacaaccccaaggaacatagtgagactctgtctctaccaaaaagaaaagaaaaggaaaagaaaagaaaaaaaattagccaggcatggtggtgagcacctgtagtcacagctactcaggaggctgaggtgggaggattgcatgagcttgggaagtcaaggatgcagtgagccatgatcagccattgcactccagcctgggcaatgaaacaagaccctgtctcaagaaatatacatatatattttatcttatatatatatatcttatatattatatatatatataatatatatgtcatatataatatataatatatataagaaatatatatataatttctttcaaaaccggtcaaagttcttttactttcaagtgatggataaaataaaaccattgtggatatcatgggatatatgtgctattggtttgaaataattttcacttttgcatttatttatctgtcaaaggagtaccaatctctaaatattttaaggattatttctatgaattctctaaaaaatataaattgtaactgtctatatcatacaaaaatatttagcaatccttataacagaaaacaagatagtaaacattgtgtgtatgttcatgtgtgtgtatgtgtgtttattggtagtctcattaatccctagtctctactgacgttattagggacattagtggaacagattttgctgaacacattttcagccactctgagtgttcttaggtattttatttatttagagactgaatctgtgttgtcctgcctggtctcaaacttctgggttcaagcgatccttctgccttactttcccaagtatctgggactacagatgcacaccactgcccagctaaaatgtactttaaataaagtagataattctggggttatctcaaactcctggcttcaagtgatcctcctgtctcagcctcccaaagtcctgggattactggcttgagccactatgcttgccacctctggggttatattagcatgacaccaggacaaaaatctgcccatttttatatcaggaaaaaaaatgctactttcatttaggtgcagaaaatggcttatgcctattgaaataaaaaattcagtctaatttagacacctaagattattatttgctataacgacatggaatacatcactgtgtgtcactgaattcatggaaatgcagtacagaatgcaatacagtaatccccccttatctgcaatttcactttctgcagtttcagttacccatggtacaacacgataagatattttgagacagagaaaccaagagagagaccatattcacataacttttattacagtataattgttctgttttattatagttattgttgttaatcacttactgtgcctaatttataaattaaactttattgtaggtatgtataggaaaaataatagtatatttaggggttgttactgtccatggtttcaggcatcctctgggggtcttggaatgtattccccatagataaggattatctactatatacagtcaggtaagccattcccattgattttattacaaattgcagtgcttccatggcttgcttacacataatttgctgaggtaacttttgcagaaagtaaccattttacgtgaacaccaaatactgattaaaaaaatctctttttctccttttccctctctttctctcccttctccctctctccttccctgtcttactccctcgttcctgctcttcttctcttttcatactcacacagacactccttcccctacacacacacacatacacacatacacacacacaccctgcccctgggcataactgaataggaaatgtttattttccaaactacagaaaaaaaccttatctcaaacactgaaagtccttccttttcctggtttggaaacactaagtcatactgagtcacttgtagattttctttagccagttttatttaaagcataaagttgtgaggacaaaatgactcaggaatttgtaatgtaccattagagcttttcacttttaggatgctagttcatattcagatgacttagtattaaagattgatgggttgtttactttctagaagaatctgaggagctcactgtaacttcacttattttgacctaagtatggcctagagtttatgcttattaattcatttatttctcggtaaagccatgtccaaggaattaaataaaaggaagcggacccagtaagggttgatgaataagaagctgttaccttactcatttacatgtattacttcaaatgttattgattgattgattgattgattgagatggagtttttgctctgttgcccagactggagtgcagtggcatgatctcagcaacctctgcctcctgagttcaagcgattcttcagtctcagcctcccaagtagctgggattacagcctccccactaccacacccagctaatttttgtatttttagtagagacagggtttcattatgttggccaggctggtcttgaactcttgacctcaagtgatccacccgcctcagcctcccaaagtgctgggattacaggtgtgagccaccgctcccggccttgatacctctttaaaaatgaagtttgttaaaatgatcagaaactttaatgcagctgattgcattgccattgacatcagtgagaaataaaaactatagctataatggttaagttgagcagttggaatctgtatgtctgtatctatctatgtttatttagatgactggataaaagagtcatgattcctcctagtctatcacgtggtaatgccaaggtcagaaaaatcatttgttatgatctatcttatgtaaaagcctgtggagttactttgttttcctcactcataagatgtcaaaatgtgctttctagaatttttgaataatttttgcttaaattcagtgttaaagttggagactgaaacaaatttaaatctgttgttagccaaagagtaaatcaagcttatgtgggtgcaatatataacatgactacccaagaaattctgcaaaaaaatgtagttgtctagcaattaggtacagagttgtcatcttccttctatgataacttttgattataaaaataattgaaggtaaataaactgtaaatgacacaccacctcaagctatgccacatgggcacctaaataagttctttttagtaaatgccaccaaatggctgtatttcttacagcttatggctaaattctgacagaggggaggtgccttcaccataagagtattttctctttgaagttttcatggttttgtgtgtgtgtgtgtgtgtgtgtgtgtgtgtgtgtgtgtgtgtgtgtgcgcgcgcgcatgcgcacacactagtttatattaggttagagtttaaaaaaagctgaagatagccaaaattagtccagagagttagacttgctgccaaactaaagaaatagcttggtttcagtattcttctggcttctcagtcttaacatttggggacctgagtgcttgatttgagctgactgaaattaacccagatggcccactttgggtcctcaagagctaattaaaggaagtcatttcagttgctgaataatcaaggccgtaccttcctccaatgttggtttcagcccacaccttacagatgatcgctggctttctgaagctctctctaaactcataattattgtttggaccctgcatgtaactaaattaatttgccaaggatgggaatgaaatgtaagttttattggcaacaatggtaatcccccaaaacagaatgacagatacagtgatggtaataatgttactgccctgttaatgcctccgaagataagatacacttgaaaaataatgtgaaaactgaatttgtccttgatttgaaaaatctgagaatcacataaaatgtttgttaatttcttaagctggtaaatatcattaagagaaatggacacatataagataagtttgtgtgcatatttgtacacagttaggtttttggaaaaagacagggatatcagatgctcctgccaccagggttctggccaaacacgacatttcctactcttgtttttgaagagttctaacacttcatcagttttcaagtgtcagtagagagtgggcataa

SEQ ID NO: 246 - DNA, 294 bp, Homo sapiens
tttttttttttttttttttttttttttttttttttttttttttttttttttaaaaaataaaccccccctttttttttttttttttaaaaacaggcagggggctgacaaaaaaaggggtgtttttggaatactgttttgttaaacttcccttacgggaggttaaatccttaaaactaaggttttccccccaaaaaaagattaagggaaacatcaattgcttttcaaacttgatggtggctgtttaaaaggggggttttccccaaatcctaaattaaaaaaaaaaaaaaacccttt

SEQ ID NO: 247 - DNA, 1943 bp, Homo sapiens
ccgctccaggaacaaggccgtgcggacaggactgacctaggcgcttttccccgtcgctcccagaggagaaacgtaccggggaggggacagaccgtgagcaagtggtccaagtctgcgcagggtgaccccgaaggcccaccggagaggccgaggcttgtgggctactagaactaggcctggtaggtgaaggaggcgggtgaagggccggatccaggactgaatccgggagaggcggggcgaggaggggactccggtgtagctgcttgggcagctcccgcggcccctctggcgggggtgaccgttattggactcgcagagggaagagttgggtagcgtcccctactcacctagaagcgctgccgcctgaggctccagctgcccccctcccaattcaagccacgtcagctcgggaagcccgtacgcgacaccttccaccgccgcgccccgccagggactcagccactagcagttgggacggaagatgggattaagacaccgaccaatcaggactatcggcaggacgttaccagggagaccaggcacaccttgtttgttaccaacctatcaacaatgacggaaaccaatcaacgacagaagatgctccgcttcctcaaagaaacagccaatggaccctaaagagtgaatgaggggagtgattagacccgagtaggtgccccggaacaagatctggggagggacaggaagtgtcgagtgggcgggcgttctgggaaaggtcagatgttctcagtgtgaggtggttatgctggcttcctccaattcctcctcttcgtcggctgtgactgaccgagacagcggcttgggcttcggcagagacttgagactgcgggcacccgctgccattaggattgttgaatgagctgtgagaagggagtgggggatatgggactcttagattgaaaaaatactggagcctcttagttgttcgtctagtttcaccttttgattttgttgatgaaaaataattaaccacagaagtaacttgcccaaagtcaaacagcgacttagtgatggaactcggactagaacccggtgtcagtatgaaagaggatcagcaatgtctgtaaggacatgattgtgagagagagagtagtgaatactaggaaggtgcctcttacaaagtggagcctaagccaggacctaagcaaagattgagagttgagggctcaggctctgcaatgagtgtcagtgaggagctccagcaaaagactgaaatcactcatgctttccttaaacccctaaggaaagggaaggaaagtagccagctcccaatgagctgtcatttcaggcactctcttggcaataagagtaatgttagtttgaatttattgaatcttgctgtgcactcagctggcccattgtatgtatactcatcttaatgattacataacttcacaattcaaacatcagctaagtaaggcctttcctggctgcccatcttacggaactggaggtcattattctaagtgaaataagtctggcacagaaagacaaatatcccatggtctcactcatgtgggagcttaaaaagttgatctcatggagtagagataagtaccagaggctgggaaggtggagttgggggagggagggaagagattggttaatgggtacaaacgtagatagaaggaataagttcaagtgtttgatagcacagtagggtgactatagttaacaatatgttatatatttcaaaataactaggagattagaaatgttccaaacacaaaaatgataaatgtttgaggtgatagatatcctaaacaccctgatttgatcattacacattgtatgcatatatcaaactaccacaccccataaatatgtacaaatatgtatcaatacaaacataaataaaattgcaatttcctgcatgcactaaaaaaaaaaaaaaaaaaaaaaaaaaaaaaaaaaaaaaaaaaaaa

SEQ ID NO: 248 - DNA, 795 bp, Homo sapiens
cttaatttaaaagacagaggctccaaaatgatttcaggactgggctggaaaggatacttctcttttccttatgtcctcctttggctggtttgaagggtttgcattgcttctgatttttctcattgccccatatgatgggtttctgattttgatgttttccatagtgaggatggtgtataactaagaagcccagctttgagttaggaagattaggatccaagtcctaaccttaagcaagtggcttggctgttaaattcttggtgtcctcatcttaaatggaaataatagtacctgctgcacaggttattaatgagtaagtgagataattataacatgttgtgcaaagtgcaaggctgaacattgaatagcaaccacaatgatcattatcattattgcccgtggagcttctctgccgcccatacagcctctctgaggactctccctgcacctagtttttgtgatgataatgggtgtcatgctgacatgtccctcctggatggcttcttccagcacagccagcaagcctgtgctaggcttcaccaccgaagctgcctggccttggacaagccatgtaggttctctgggctttagttttctggaacaaataagagttttgcaagctgcaaaggactgtacaaacgctaggcatcagctagaatgttgaagaagatgcaggacccctggccagtctgaatagcaggaattgggtaggagggtgagactaagccacttttcttatgatacttttgttgaataaagggccactttccaagcaaaaaaaaaaaaaaaaaaaaa

SEQ ID NO: 249 - DNA, 1429 bp, Homo sapiens
gtcgggcgggcctggctcccggccaggcgcccaaacaataaacaatcccccgggtgcgggcagggggtttcgccggccgcagccaggctctaggtgtgcgctggcgaatatctctatcaaccgcgaggagggaccgggccgggggcgcgggcgccgcggcgggcgctcttaccttccacccacagctcctccacgttggtctcgaggttcgctgcttttaatcccaccgcgaaggccccaaatatgaggaggcccacaaccaagaacttgccgcagtttttttgaatgtaacaacccagtttaaataagagtctctgaaacttcgctctcagccacagcggcgctttccggccagtagccttcccctggggacgaagcagaagggaggagtgagcgccggggagtcgcggcccgcgcgcccacgcccgcttgcgcgcacccgcccggtgagcccccaacagccgtgggggcgcgggtggccgcggcacacggactcgccctcgagactgcagccccggcggatctgagcgtcatggggggctcggtcataaagccgggccgcagcgtgggagctgcacctcggggacatcagggcgcccccacccgcgggatccctgagcgacttggggcactggggctgcaatacagaagaggaagccgaggtagagaggagagaaaccactcgacacagacaatattcaccccagagctgagaagggaggggctgcgtaatcccagcgatggagcccaaggttcaggagccagcaaaccagtcctgctctgtccatcaccctcggggacgggcgctaggggcgagcgctctttggaacaacatattgcgggttcccccaactggacccccgccgagaatggtagtaagtggggatccacgtggtgagcgcggccgccggagttcactcccgacgcatttccatagcgtggggagaggctgtgtgagctgaattaggaagtggggcagccagctgcaacttacgacaatatttgtgatcggaagagggcagccacatggatctttccctcctctcccttcctttctggttaaacgtaaaaaacagccgagtgcaaagggaagggctcaggccggcgcaggctgctccccggcgcggcatttccccggcgctggccgcggccccggcgggcccccgtctgggtgctcgccttccctggattccacacatttcagcgagcctcgtaaacacaatgaacccggcagctccgcagactcgcaccgcgaatttaaggtggcaatttgtttacaacttttcctcccccgaccaggccctaaggagaggcggctcaaaacctggaaaacgggggggatatctttttccgagaataattttttaagggagcagagatttcatgctcaacaaacccaaaaaaaaaaaaaaaaaaaaaaaaaaaaaaa

SEQ ID NO: 250 - DNA, 463 bp, Homo sapiens
tttttttttttttttttttacataccatttacattttatcaggtattttaatgtagagatgatttaaaatatacaggagaatatgcataggttacatataaatactatgccattttatgtaagggacttgaacatctgcagattggggtgttcacagctaaacagactgctctgtgcagggagaggccctacagtgaagggaaaagtagacacttgattgtggactaatttgttcagtatttcccaaaaacttacagctaacaataatattaaacaggttttattagcatcttatacatctgacactctctcctaagcatccagtttattttctagtcacgggttacttactaaaagtctgtgtaacatgagctcacatcagattagaaaacatcaagtgggtagtatttttgactgaattaacatacaaaagaaattgcctatatcatgtatatgggctcca

SEQ ID NO: 251 - DNA, 241 bp, Homo sapiens
ttttttttttttttttttttttttttttttttttttttttttttttttttttttttttttttttttttttttttttttcaaaaaaaaaaaaattttttttttttttttaaaaaaatttgccccccccccgggggtttccccccgggggggggggggggcccccgggccccccctggttttttcggccccccccccaagggaacttaacccaaagggggggggggggggggccccccccccc

SEQ ID NO: 252 - DNA, 388 bp, Homo sapiens
gttttattttttatttaattatatccatagaatccactggcttcggagtcataggcctgggttcaagtcctggcttcactggtaacttgctctgtgacctttgataggtcatgtccgcactctgggcctgagcttctttgtctgcaacgacactggctagctggctggtctctaagcatccttccagcgctggatccaggctagtctaaggtggattggccctttaagagccgaaaaagggggaggagccgaggttctttaaaaacaaaaggggatggggcgtttctgggaggggagagaccgggaggggagcctggagattcgggcagagtctccctggcctggaggaaaccctcaagggtcttaaggcgtgaccctgcagccggga

SEQ ID NO: 253 - DNA, 2312 bp, Homo sapiens
gctcaatgcgagcggctggcgtaggcttggtggactgtcactgccacctctccgccccggactttgaccgcgatttggatgatgtgttggagaaagccaagaaggccaatgttgtggcccttgtggcagttgccgaacattcaggagaatttgaaaagattatgcaactttcagaaaggtataatgggtttgtcctgccatgcttgggtgttcatccagttcaaggacttccaccagaagaccaaagaagtgtcacactaaaggatttggatgtagctttgcccattattgagaattataaggatcggttgttggcaattggagaggttggactagatttctcccccagatttgctggcactggtgaacagaaggaagagcaaagacaagtcctaatcagacagatccagttagccaaaagactaaatttgcctgtaaatgtgcactcacgctctgctggaagacctaccatcaaccttttacaagagcaaggtgctgagaaggtactgctgcatgcatttgatggtcggccatctgtagccatggaaggagtaagagctgggtacttcttctcaattcccccttctatcataagaagtggacagaagcagaaacttgtgaaacaattgcctttaacttctatatgcttagaaacagattcacctgcactaggaccagaaaaacaggtacggaatgagccctggaacatttctatttcagcagaatatattgcccaggtgaaagggatctcagtggaagaagttatagaagtgacgacacagaatgcattaaaactgtttcctaagctccgacacttgctccagaaatagcttcaaaaccatccattacaaaatcgaatcaactgcagggggcagcatttgaaaaatagaaatgttctgatgaagaatctgaactgaagaagctgttttatagggttataggagattgtaattgtagagaaatatttctcttagaaataaaactgggcttggatcctgaaaccctgggttctgattctagccttgtgctgcttttcaattagccgagttctggcaggatattgggaaaatactgctacttcttacattgcccttttatatagaaccaccacctgaactgaaaccattgctactgggaagggtggctcccacaggaagagtataagcactactgtgatgaggatggagtaagctaaagtatactttttttttttttgatggagtttcgctgttgttgcccaggctggagtgcaatggcacgatcttggctcactgcaacctccacttcccaggttctagcgagtctcctccctcagcctcacaagtagctgggattacaggcatgtgccaccatgcccagctaattttgtatttttagtagagacagggtttctccatgttggtcaggctggtctcgaactcccgacctcaggtgatctgcccgcctcggcctcccaaagtgctgggattacaggcatgagccactgcgccagcctaaagtgtgttcttaccacctatttttcttcccataggagttagccagtgaagggagaatgtctggttttctatgctgtcagaaatctcttttctaggtttgtaaaattgaacttttagtacttcgaattatttctctttaagataaaaatgcatacgatttttacactgatcttagatttttgacttatgaggccagtggtttaaacaatcattattgaataccaagcccaaaagtttagttaatacaccaattgtaagttctggtctgaattttgtcaacatatttagaatgtaaatggcattattaaaaatgtatctgatttctctgtgaacagtaatatttcatatttttaagtttaaaaatgttagtgtaagccaggcacagtggcattcacctgtagtgccaaccactcaggaggctgagatgggagaccttttaagcctgagtttgagtcaggcctgggcaacatagatgtgagcacctatctctaaaaatgtaaataaataaaaatctcaaaaaaattaaaaatctcaagtgtaaaaacagttctgtagatagatggtagtgatggtagcacatcaatgtgaaggtatttaatgccactgaactgtacacttataacgaattaggataaattttatgttatgtgtatttactacaattttttaaaaattgtatatgtagtttaacaggtgtggtcaatatcaaaacttaggtatttaattttgttaaattatataagcagaaaatgctggaaaaagtacctgtcatagaaaaaaataaacttcctaaatcaaagtaaaaaaaaaaaaaaa

SEQ ID NO: 254 - DNA, 466 bp, Homo sapiens
accatatacttgtataacctttaacttaaaatacacaattctttaggtactctattcccctaatagagtacttaaggcctgcaactctcacccctgcaatttgcccagcatcttgcccctgcaacttgcccctgcaactctcacccccacacccaacccaaagcatcccatatctgaaagctaactgaaactacctggtagaacttcagctactaaataatattttggagatatggagctttcctttaaaatatcttcaattacttccctaaaatcacctctgaggagaaagaatcctatcttacctaaggaaacacaaaatctcatttcttttcaggtccctaaccatcctcttctagagaaagacaatggtcttggttataagagcccctccttctccttatgggatctaatcttggctaatttcactctcccacataaaaagagcaacctcaactgccactga

SEQ ID NO: 255 - DNA, 1724 bp, Homo sapiens
gagcaccggaccaaaccattccagctgccgacacccttgcagcctttttggagcaggacagatgcttccacgacgggtcaaaagccattttggaagtgggcaacaccggacaatttttgaaggaggaacgctaaaccctggcgaagtggcttcaaatacagtatttgcataaaaggggatatttctacttcatgatttctcaacctcggcacatattgaactgggcagtttttgtgtgggggttgtccggtccttgtaggatgctgagcagttgccctggtctttctccccactcaatgccagtagcactccccaaaacatgtctctccagatattgccaaatgtcgtctcggggagaaaaatcgtcctcagttgagaaccgcttctatttgaactccgaaccgggttatgattcaatagctaactatggtggtgatttagtccatgtatgaatgtcatttttaagctagctttttggatttgaggttatggctgaaaggactgataaataatatacatatttgaccacagtctgcgaatatgaagtttattctttgagtttcaggcactatgcctccttgattcaatgaagaaccaaatcaacttacagctagctactcatgggcttgaactttctgctgctgcttcagctcagctgtctacaactagaccacatagctggatgaagctatttaatgcattgtgaaaacattccctctgccctctgagtgtatgcacatccagctcttcagatgcctgcaacaacagctgttcaagaatcccaacctaatccattctccacagatgtggagcccagaagatttgtgagttgttaaaccaaaacaggatgcaggagcaccaggatggcacccggagactctaaccatggaatgcgtgggaattctgtgattatttctccatcacacatttatcacactgtagagatggactcaagaccagtgcttctgaggccttttccagcacttctcattctttcagatgccttttgcaacttaacgttctccttcttcttcatcatgccgtgtttattgaaaatctccctatctcattaatcagaaaaccccataatgacaggaaccacatcgttttgcttaccagagtatctaaaaccaaaatagtacctggctaacaacaggcattcaatatttgctgaatggagatcatagctgtgtttatatgtaagacagacaataagtagtcattggtattagggtcacatctcctttctccttcacactgatttacctcatttcattgtgtttatctcacaccattttgtaaattatcccatgttagctattgttattctcaaattccacgcatatgaagaaaaacagtaattagaaaataatagcaatatccataattatgggagctactatttactgaggggttactatccagcaggtgtatcacatttttcccataatttattccatctgtccttagccaaaatgaatgtttaactttgctggtcacatacaagttttgtcgcatattcttcttcctctttttctttatttccctctctctcttcttcattttcatctcgcaaccctttaaaaatgtaaaaatcattcttaagtagcaagccatacaaaaacaaatcgtggactagaagtaaacaatgcattatcttaattttgaacatgagattaaaactgaagcctaaggaatcatctaatataaaaaaaaaaaaaaaa

SEQ ID NO: 256 - DNA, 1921 bp, Homo sapiens
agatggcggcgcccagtggcactgtgagcgattcggaaagtagtaacagcagtagcgatgcggaggagctggagcggtgccgcgaggcggcaatgccggcttggggcttggagcaacgcccgcacgtggcagggaagccaagagccggtgctgcaaatagccagttgtcaacctcccaaccgagcctcaggcataaggtgaatgagcatgaacaagatggcaacgagcttcagaccacccctgaattccgagcccacgtagccaagaagctgggagccctgctggacagcttcattaccatctcagaagcagcaaaggagccagcaaaagctaaggtacagaaagtcgctttggaggatgatggtttccgccttttcttcacatctgtccctggaggccgtgagaaggaagagtctccccaaccccgccgaaagcgacagccctccagctccagcagtgaggacagtgacgaggagtggcggcggtgccgggaggcagctgtgtcggcgtccgacatcctacaggagtcagccattcacagccctggaactgtggagaaggaggcaaagaagaaaaggaagttgaaaaagaaagccaagaaggtggccagtgtcgactcggctgtcgctgccaccacccccaccagcatggccacagtccagaagcagaagtcaggtgagctcaacggggaccaggtgtcgcttgggaccaaaaagaagaaaaaggcaaagaaggccagcgagacctctccattcccaccagcaaagagtgctacagctatacctgcaaactgaacccagccatgggcacagggctcagccagctccaaggacaaggtgtcccccccaccctggggacaaggcatttccaagccccacctccctctccaagttcaaggactgggctggcaaacccagactgcccatgagaccctgatggtgatgaaggcttgctcgagagttgggccaaaaaagtggctgtagggtgagaagaccaatcaaggcctgcccctctgtgctcccacggagggctggcgggggcgctgtggttccagaacatttcatgacctcaggaaaaaaggaaccttccagttatttgagactagtggccaagtggtgaaacctccatctccctagaactgtctgaggtgggcaggggaagggagaccttccccaccacctccttagcctggtgtgagaaacagtttttagaaaatgagagaagggatccccaagaggccaaggcccagagaaacttttgttcttctctccttagcccacatagacttcacagaatcgtctgagaaaggagagctttttcacccctggctttctagaattttctttgtctgcatttgtgaatataccacacatgatggtgtctctgagccgaccagattatggaaactcaattgtcagaggacccaaaacaaaacttagagtgatttggatattgcctctctgtcaatgctgaaccttaagacattttaagtaaacatcctcctcctctctacacccccaggatttgtgcgttcaccccacccaagacttcaggaagtgtcatagcactcgtggactaggtttcatgggacaaaggcattctgcaagaagtagaagcttgtggccgggtgcagtggctcatgcctgtaatccaagcattttgagaggccaaggaggtggatcaattgaggccaggagtttgagaccagcctggccaacatggcgagaccccatctctactaaaaatacaaaaattagctgagcatgttgacacacgcccgtaatcccagctactcaggaggctgaggtgggagaatcgcttgaacccaggaggtgcaggttgcagtgagccgagattgcgccactgcactctagcctaagcaatagagcaagaccctatctcaaaaaaaaaaaaaaaaaaa

SEQ ID NO: 257 - DNA, 416 bp, Homo sapiens
  misc_feature (366)..(366): n is a, c, g or t.
  misc_feature (400)..(400): n is a, c, g or t.
tttccatttacttgtttattgtttgtctccaccaaggactgtcaacctctgagagtaagtaccttaacgcagtccttggcagtcattggcatcgataggcatttgttgaatgaacagacaagcttttcttgactgcccgctatgttcaggcactgtttttggtgctggagactcggtggtgagcaaggcagacacagtccctgtgttcctggagtgactgaattgaaatccactcaggcgaacattttatttcctggccaccagtttcatgtcaagttgtatcttaactgtttcttgagagtgcccagtacaaatcttatttcatgtgtctaatgcttttctgcctttcttctcaaaaccatgganagatggtgatctctctgtgctgttgttagcatcnctcggtgaaatcgttc

SEQ ID NO: 258 - DNA, 467 bp, Homo sapiens
aattggttcaatcatttatttattagagtgagtgcaatacagttcctgcccgcatggggggaaacaggctgggaggagggccaggggcaagtaagtgctaggaggggaaatgggagggggctgggcgggcactgtggggaggggcaggggttcccaaggcaacgtcgaaatctccaaatacagtgggcctgacggggatgacagagaggctgaagagacagagccgtcctgcacagtccaggcaccaccctgccctgccactgcctggcgggcatcttgagctccagacccttagcctctccgggccccccagttttttccgggtaagagactcgaactgatgctctctaaggattcttcaagctctgaaattctctgctgacatttgccagcagcaaggttgactcgaatctgaaacctctggggaaagtgggggcctctcccagaatggaaccctctctgaacac

SEQ ID NO: 259 - DNA, 31484 bp, Homo sapiens
tcttaaatttacaccttttcctatattggaagcactatagaagactcagagaaattcaaaaataaaagagaaatggatcccagcctcagggaatctctcctcccagtaaaggagataaggtagtattaacataacaaaatctgtatctctaactctgatctctttctaaatccttaatttccaactttttgttagtggtatactgaggatcataagttaatcttctgagtccaagtttaaaagtcttgtcaatattttatgctgtttccttgtaatgtatcaaaacttttgccaaagatttgatatatctcatttttaggaaacccatgctggttcacagtagtcactgcttcatgtttaaagcatgtacgcaatgatcactgagaatacaaatggtttccaggaagtcaccattattaatctcatatacaaaatttgtgaaatgtgttaacaaaagttttattgctttatccaaaatatttattgctataattgtcaaatagcctatggacaacttgatattgcactggtaggtgcaaggatgacacttggggaaacactggtctagacttctggtttctagtccaacacataaagaacttgaaagtcatcattcctgtcctcataaagagaaataagttaaacaaacggaaaatcatcaactcttcttacatccatcagagaaatgaggtcaaagggcagtgccctgaaaagttaagactgaggcagacactgagaatcacagtttattaatagcaaatgcctgctgctggtgccagtactaggcagagacaaaaagcagagacaagccattttcttgtaccctgtacaaatttttgacctacacaatctgtgagcattataagctattttataactaaatttggaacacctcctcatgatatctgcgatttatctaaataacatattatccttctagtgcttcttaaatgtttacaaactaaggaatactgatatataaatttttaagtaagagcaaagtattctaacaagattggctgtaactgaccactagtaaaacttactaaataatgagtgagaacagtatggcaccgcagttctcaaacaggatcctctacactcttaaaaatttaggctcccaaagaacgtttttgtttatgtactatcaatactgaccacatcagaaattaaaactgagaaattctaaaaatattaatttatgatttaaaaataacaatgaactcactgcatgttaacacatattttttaaaacaatatattttcaaaacaaaaaatttagtgagaaaggcattatttcccactttttgcaaatccttaacatctggcttaacagagtataacacagctgaattctcctatgtgcttctggtattcaacctgttgtgatatcatcatgtatcctctagaaaatggcatcaaatccttgtgagataatgagaattttaaaaaggtaaatattttagtattattataaaaatgtttttgacttcacagaccgctctcacattatgagaattcctggtacaggcatatctcattttattgtgcttagctttattgcactgtgcagatgctagtcttaaaaatacacgtaaatctcagggagaaagcagatgctgcagatttttttcggatactctttatcagattaagaaagcttcctccaatttctagtttcctgcgagttttaatgatgagtagacattgagctttatcaaatgctttttctgcatctattcagatactatttttttctcttattgttttaatgtggtatatcacactgaatgttgaacaaacaaaccagaatttcttaaataaatcctcccttttgctcgtattttaagatgtttacaatctatgtcataagaaataaccttgccaggtatctaagttcagtggctttataagaattgggtcatgttaattcttttccattctctagaaaaatctgcataagataggtactaattcttccttaaatgttggaagaattcaccagtgaagctatctgagcctggaggtttctcttctgggtggttttaagtaatgaattcagtatctttaaatagatacaaaccaaaattattatatcagttttgttcttcagccaggtgtggtggctcatgcctgcaatcccagcactctgggaggctgaggcaggtggatcacttaaggtcagaagttcgagacaagcctggccaacatggtgaaaccctgtctctactaaaaattaaaaaataagctgggcatggtggcacacacctgtagtcccagctacttgagagaggctgaggcatgagaatcacttgaacctggggaggtagaggttgcagtgagctgagactgtaccactgcactccagcctgggcaacagagtgagactctgtctcaaaaaaaaaaaaaataaataaataaaataaatcccagtgcttttatgtatgtgtagaaactgaaaaatctgtaacaaaatgcaaaagacaatgaataaacaaggcagtcatgaagaattgtaattaagctagaggacttttattaccagatatcatgacccattataaaattacaataattaagacactgtggtatcagtccaatgataaacatacaaagaaatggaaaagaaggagtacagaaatggaaccacacataaggctacctgatttgtacaaatgctcaactgcagttaagtgggaaaaggatggtcttttcaataattggttctagaaattttatatagcaagagtacttgactcaactaataataattatgtaatattcccttgacaacagtagtttatcagtgctttagatcaatgtttcccaaagcatggtagctatcatggaaaaaagatttttagccaaataaatttgggaaatgttgaatgtgtaggcttcatttcacaggacttttcgtgaccttaatgttatgtcaattaaggattcataactttaaaaaatgccccatgaattctatctcacattatactaaaaattaagtcacagtagatcatagacctaaaagtgaaaggcaaagcataagtttctagaagaaaaataggaaagaatcttcatgattttggagtaggcaaaggttaaacaggacacaaaaggtccataaaagaaaagattgataaaacagattttactctacatagtgcattttattctgtttaaattatacctcaataaaaagcaaaaaaggagcaaacagttatttaacctaatactaggaaaaagacaaaaattatacaggtaactacatccagagacagtgtgttccaggaaaccttacagaagctttgagaaggacacaaactataaaaaataattaaaaataaaagaatatgtacagtcagccctctgtatctatgagttttgcatccatggattcaatcaatcttggatcaaaaatatgtgagaaaaaactgcatctgtactaaacatgtacagactttttttcttgtcattattacctaaacaatatagtgtaacaactattcacacagcatatgcattgtagtaggtattaaaagtaatctagagatgatttaaagtatacgggaggatgtgcataggtgatacacaaatattacacgattttatataagtaactggagcatcctcaaattttggtatcttcaggagatcctggatccaatcacccacagatattgaggaacaactgtatatctaaaaaaaacgactgattttcacaggactctaagtagaagtggagtaagagattgaaagaaaagcctggcatacagcaaaccagtaagggcttgacagacaagtcatacaacccaacaactaagaaaatgcactcatctgaaaactggtttaaaaaaaaaaaaaaaagaaagaaagaaaaaagatcagtgtgtttaatctgccttttgtgcataaaatgtatttccagtaaccaaagagttgatgaaggaaaagtcttttatagaatttcaacaagtgcagaagaataaaataattagaaaattgccactttagctgggtgcagtggctcatgactataatcccagcactttgggaggctgaggtgggaggatggcttgagcccaggagttcaagactagcctgggaaagacggcgtgaccccatctctacaaataatttaaaacagccacttgtggtagtgtcgtggtagcgtcatggtggtgtacacctgtagtcccagctactctggaggctgaggcaggaggatctcttgagcccaggaggtccaggctgcagtaacctgtgattgtgccactgcaatccagcctgggtgacaaaataagaccccatctctttaaaaaaaaaaaaaaaaaaaaaaaaaagaccatcctggctaacactttcgaaaccccacctctactaaaaatacaaaaaattaaccaggcatggagaagggggaggaggaggaacaagtggaagaggaagaataccaccactttaatccctaatgaaataatggatctgggcaactatcatcaatgtctgatttttaaaaccattaggagaaaagttgataggaacttcataatggttggaccaggctgacagcatctgaattcacagattagtcttaaattaacaccaaaggttgttaagggtggggacagggaatgtcaaaagtcgaaagtgaatctaatcaagcctccctagctccaactacaaggaaattcaggagacagaaaaagaagttaaacaacaccaccaggaggcaatcatccaaatccaatacagatattttcaatttacgatgggtttattgggacataaccccaccatgaattgagcagtatactgactgtattactttcccaccatcgtaaagtcaaaaaacactaagatgaatcactgtaagttagaacaaatgacctggtctcctcaacaagtaaatgtcatggagatgaaaagaagagcaaaggaagagggttgctgttttccattagaagaaatttaataaacatacaaccaaattaaggacctttttggatcctgatttgaacaaaacaaatgcaaaaagacatctctgagtcaggattactttcctacttttaaatttcgatttaaaagttctcaattaattatcccatccatcaacttgttttctttctagaaattctatatagcaaatatatttgactcaactaataattctgtaacactgtttctttttcaaatagtagcttgttaacccttcaatagcaatgctccccaaaacatttcaacggggatgtcagtagacactaaagaaaaaaaggtgtggccaaacaaatccgggaaatgctaaaatatacttttctttctttctttgttttttttttttttttttggcaggactcttcacagtctttaatatgctaatgtaaaatgactaggggagcacccagagtatggcatttttgccaaagctatttgctatttgaatactttttcacagaacatcccatgggactgatagaactcattttagaggaaatcaaaaccttaaaacatgtttatgtctgtcatagctaagtgtacttagatgcttttaatttgattatttaaaaacaaaataggagtatcagctaaactacatactaagtaagtgacttgttttgtatggaaaaaaacaccacaaatacttacctaatagaaacaagctataaagatttttacaacccaaaatgtaaaaaatggctaaaaataccaaatattgcacacatacctggcagaattcacatgtaacttgaatttcataagttgaataacttatcacattctttttctcatggcaagaatactgaaaaacaaagtggtttcacactgttaaaaatagttctgaaacacttcttgaaacagtagaaaataaagtgctcaaattactctctgtaacactactgtcaccccaaaactagtcactattaacaatttttataatagagtactgctcttgaaatatcaacacacctacacaaatatcctaaacataggtattaacatatctaactccaccaaagggattaaaagtggaagaaacatttaattcagcccttagggctgtgattgaagggcagccattaaaagagtaaaaaaatccttactttgaacactgatgagaatgatgcaacctagtaattccatatttctcttcagaaagcttttaattttaaaaaatgtacttactgatattcagcttctcagcctaattcatcaaaatttatttgtcccacaatgtagttgatctatataaacagctccaattgtatcagcttaaggacaagtacagtatactgaaactactcagattgatgacccatttttaaaactccaccaatggcttcaccttatggtcactgaaacctcatccagtggtaaataagagtaactatgtggttatccaaataagctaatggtgcatagaggaaaattgcatttttcataattttgttcataaatgaagtttcaagaatgtcatgctcagaaaaatttggtaattcttgtggggaaatgtgtaactagccaaagttcagagtcctggagtaaaggtggatctggtataggaaataagaagagagaaagtttcttcccttgtcccatgcaaaatttttatctgagagggttccatttcttcactcacattcaactttaccatgctgtctgcgaggagaggaaaaagaacactagaaaaatccaaggaaatctgtaatagccatgcttctgtcattacaagtagaatatgagctccatgagggcaaggaacttatctttgggttaacacctacaacagcgcctagctcagtttagtacaaggaatatttaaacatcaactatacacagacacaaagatgaagaaaactctccttgcatttgagaaactttcagtctagaggaaagaggaatatggaagtacaattttcaattaatttggtaggaataagagttaaaatattatgagagtagagaggtagtggagggatcaatctgatagctctagaaaaactttcagagggagttagcccttggtacccttctccttaatcttttctactctccactatactatccccctcctctacaaaacaagtttcttacctacacagcagcccatttcttagccaacaaataaaaactccattcccttattaccattttctaatacctagctaagagagttataaatattaacagttcaagcaccctgagacagaaacgataacaattctgggaggcttaaatgctatctctttgttaatctaactgaatctaaagcctataaatccaggcttatctcctttttattgcagtgttgcaaatatgctcataacagaagcctggaagggaggttttgctgagctatagattgttggagaagtcaatgactgcacatagacaattgttaatatatcacattactctctggcaagtaactacaatctatactggtaggaaaatcaactgtcatgaaaagcaccaggagagttctaggtaaaattttttagaagtcggcttctttgatttctcttaactcttcttctaacatttctttatcttccttgctcttgagtttccattttgtacttggcatgagtacttcttgctagatgctggggatgtactggcaaatcaagatagatacctgccttcatggagtttccaagatagtgatggggcttacattaactaatcaagcatccaactcagagctccttttcttacaacctcaaattaagaatcaaaactatcactgaataccataaatacaaatctgattatccacttagtaaatcctacagactcaaccttttaggtatactttgagagatacaaatttagctatcatttatatctaatctgaccttctaaatgctacttccaatacaccatggcccatttaacagtatcagactgcctgccatcctctgaaaatcaccctcagtttgcatattattttagctctccctaaaatataccctcccaaatgaatgtttgcctcctttgatattacactgtcaaggcccacttcaaataacacttcctttgtgataccttccccataatccagattgaaaatttcttccacaagctatgttgtttatgctttgcttacagcaaccacattgtgttctgtaatgtcatctattatataatctgtgtgcttctcccaccccattctactgcctactacttcttgaagaaacataacacagccaaaggaatatgagcttttgagtcagaactggctccaaaacctggttttgtcactcgtaagttatacaatattgtgcaaggttctaagcaactttgcacttcagtttcaccaactataatacaagggtagtatcacctacctcacagttgttgtaagcattttaaaatagtatatgtaaagtatatagcacaatgctcggcacatgagtactggataaaatggcagctgcagttctattatttctactgttattaaaattataaggctgtctctattcatcgttgtatctgcacagtatcttacttgctaacagcaggcacagagtaattgttaaattgttaaaagaaattatatcagttggatacattttaaaaaattaaaaaaactgtaatttgtaaaatgggtaagtccatatttacttcacatggaaataataactctgcatcttggagaagctaccaacctctacgctccaaggttttaaagaaatagatagccaggcgcagtggctcacgcctgtaatgccagcactttgggaggccgaggcgggcaaatcacctgaggtcaggagttcaagaccagcctggccaacatggtgaaaccccgtctctactaacaatacaaaaattagtcgggtgtggtggttcatgcctgtaaatcccagctactcgggaggctgaggcaggagaattgcttaaacccgggaggccgaggttgcagtgagctgagatcgtgccactgtgctgcaacagagtgagactccatctcaaaaaaaaaaaaaaaagaaaagaaagaaagaaatagattacattaaataccaccactcctttaatcaggaaaagtgtaaacagatgatttttattaaagagacagaccagtaaatttgggtaacctaaagttcaaatattatgaaaaatctaaaacatgactttcccacttctcagcaaattgtaaatacttccattccaattcttcaatactggtgaaggcatcttaagtaaattgctgaaatatactcactcatgaacataaagtaaaatgaaggttaaagcaaaatgcccaaaaagttaagctaaaattaaagtgccataccaatgtgtgtaaaaagcagaataatataactccttctttgagaaaaaaataacaaaatacatcaggaaatcaggaataaatttaagtaacaaataatctttaatttcatagaggtaactatgaagcagtcactgcacagatacacataagaaaaagtgtcctcattctggaatgtttacaatgccttgtgggtttaaaaaaaaaatcagctaggcgaaaatgccaaagattaaaagtcccaaatcagactgcatcttggatttgctcttcttttactaataacttggttcaaagtgacaatggcattcttaagcgaataaagagattttcttgaaaactactgacactacaacaatggatgaatctcaaaataattatgccaagtgaaagcagacagtcaaagaaattatattgtatgattccatttatataaaattctagaaaatgaaaaccacagcgacagaaagcagatcactggttgctgagggacaggagtagaaggagtgggagggaaggattacaaaggggcatgagaaaacttttgagggtgacaaatttatcatcttgattgtggtgatggttttatgggtgtatacatataagtcaaaacgtatcaagctgtatactttgaatatgtataatttattataagtcaattataccttaaaaagctgtttttaaaaggataccttgaactgtttgaaaaataataaatcctgcccaaggtgcaatggctcacacctgtaatgatagcactttggggtgccgaggcagaaggatcagaggccaggagttcaagaccaccctggggaacataaggttctgtctctatacaaaaaaaaaaaaaagcaacttaaaaattagccaggcatggtggtatgtgcgtgtagtcctagctgctcaggaggctgaggcaggagaatcccttgagcctaggattttgagactgcagtgaactatgctcttgccaatacactccagcctgggggatagagcaagaccctatctcaggaaaaaaaaaaaaaaaaaaaaaaaaaaaaaaaatatatatatatatatatatatgtatatatatatgtgtgtgtatatatatgtatacacacacacacacacaaatatccttaaaatatcaacttcaaggtttgtgaaataaccttcctgccatagctgcatgaagtcaaagaccagggctaatgaccatttgaccattcataaatggtatctgtcaattacttaagtcagtgaaactcaccctagtttttttccctcctcctatcccaccatgggctggattcttcatttcacatcctacaaaaactcagcataatttccaggtttgaaatggcaactttctctctgtctcctactggcaggggcttaataaagtgcccccggcactttatccaaattaaatacaacatgaagctttatcttcaacacttaaaaatttcacctaggtatgtggttctggtagaatcaacataaaactataaacatatttttcttttcttttttttcttttcgggacggagtctcgctctgtcgtccaggctggagtgcagtggcgcaatctcggttcactgtaagctccatctcccgggttcacgccattctcctgcctcagcctcctaagtagctgggactacaggagcccgccaccatgcccggctaatttttttgtatttttagtagagacggggtttcaccatgtcagctaggaaggtctccatctcctgacctcgtgatccgcccgccttggcctcccgaagtgctgggattacaggtgtgagccaccgtgcctggtccctataaatatatttttcaaatgtgaatctacaaaaatcttaacatgtatgctatctacatgtgttacttcagaaaaaaataaatattcctccatacaaactgttgtcaaacttcaaatgagaaatatgaccaaaaacagctctggggtaaaagagcactaacaattgctcccaagattagaggaagagatggaacagaaaaatagggaagagcaaatccctgaaaattctaaaaaagaaaagaaaaaaacctacaaaatatattgaggtaataggcagttattttaatatagacataagaggatcctatgaactgagaacacttgcttgatgttctgctgcagaacttagatcagtacaaaagtgaaggcttcctctttccagttttcttttctttttttttttttttttgagacagactctcgctcttgtcgcccaggctggagtgcaatgttgcgtctcggctcactgcaacctccgcctgccaggttcaagcctccagagtagccgggattacaggcacgcaccaccactcccggctaatttttgtatttttagtagagatggggtttcaccatgttggccaggctggtcttgaactactgaactcaggtgatccacgccttggcctcccaaagtgctgggattacaggcctgagccattgtgcctggccctctttccagttttctaagatagttccacatacaaacatgtatatgttcctcgtatttcctctattttattgctataaagcatgttattttagaactccatacttgtttaaattctactttcaattttgtttgtgacaacatatagcaatttctgctattaggtatcctgtataaatgatcaatcttacataattctaaaaaaccctaacgctgccgaaagagagagagagagagagagagagagagagagagagtgtgtgtgtgtgtgtgtgtgtgtgtgtgtgatcaatcttacataattctaaaaaaccctaaagctgcagagagaaacagaaagagagagcaacagcgagcgagcaagagagagagtgtgtgtgtgtgtctgtgtgtgttttaagagacagagttttgctctgtcacacaggctggagtgcagtggcatgatcatagctcactgcagccttgaaatcctgagctcaagtgatcttcccgcctcagcttcctaagtaagtagctgggattacaggcaatgctaccatgcctgactaaaagctgaagttttcattggcgttcagaaggagatcacttgttatatcctaataatgtaaactaaactacacctaatgaactaaggcattataaggaactttaaatctgctccaagaataatacagaagggcaaaaagaaaataaaagttaccttgaatactaccattcagagataactactgttaacatttcagagtacatagtctagtcttgtcaatgtatggtgatacataactttataaattataaaaacatgactctatgacaatgaaaaaaagaagaaaaatatataaatagtattacaacttcctctaaaatgcaattatctaaattctgccatataattaaatagtaatgtcattaaatagatgtcatttttaacggctatatagtactccatcatataattattaatgggcttttatcatcaatgaatatctttgggacaaatctttgtgcaatatctgtaataaattccacaagatgaacttctagaagtgaaactgctatatcaaagtaaaggcatattttaaggctttcaatttatattgctaaactgccctccaaatatacagtattgatttctactttaccagcagagaaagacctcatttcttaataccaacacaaacagtggatatcattttttaacatttttgtcatattagtaaaaaaaactaatttttaagttgcatatcttgacacactaatgaggctgaactttttcatatatataatggttatttgtagttctatgtaaaatgcctcctctgcccagcccccgcctttttttcaagatgaggtcttgctctgtcacccaggctggagtgcagtggcatgatcatggttcactacaggctccaccttctcagacttgagcaatcctcccacttcagcctcgcaaatagctggaaccacaggtgtataccaccatctccagctaatttttacattttttgtagagacaggatctccctatgtttcccaggctgatcttgaactcctaggctcaagccatcctcctgcctcagcctctcaaagtgctaggattacaggcatgaggcactgcacctgattctttgcccattttttttaaaaaaaaatgttagttaaaattctctcacttgaatatagaatataggctttttcttatgacatggatttctgatcgggcacctcgtcgttaggttcctaatatagtcctaactattcattttgcaaatgaggagactgaggtctgaaagggtaaaatgacttattcgaggtcaaaaatgggacaaaaatatttctcctgctattttacgactaacaactatacagaaattttatgtaaaccacttttaatagtacagagagacttttagaatttctagagttattagacaggctcattaccaaatggaatcatgtattataaaatgccaataagaaaagagaataataaagaaaaacattttaagaaaagatgaatagaagaaaatggaagaaattaaccggcaaaacacatcttccaacttaaaattcacataaaagttaagccaccagagaaaacaaatatagagtgtctgcacgggaggtagctcagacaggctacctgagggcagcccactgcagtgtctgagtctaagcagagtgagaaagatgtccactgggagatagatgagttgagggttgggctgggaaaggggtggtcagccctgcatttaatgttggagtctcagaaggataagaaaagaagggaaggcagcctgatgtgagctgtcaatgcccaagtgggctaaggcggcatccacatgaagtaaaggataggagtggcactagtccagcacagggtgtcaggacccaaacaggaagacatctacttgatggagaggaaaggtgagtgcctaatggcaccaggcaattcattatgtaaatacgtggatattgatcaaataagtaaacatatcaaggatgtgctaggtaagagtgaattcatactacagttgaagggaattataaatatagaatgaaccttggtattagatgacatttgaagatactaatggtaacttatggctctcaacataaagatacagaaatatagatgttaatgtgtatatgcacgcatatgtggtcatgtaggtccctagctgtgtccactgagagggcctgggaacactgaaaccccaataagcacacttagcatccagactctggagtgtgatataggttgaatatatgtccctgccaaatctcatggtgaattgtaatcttcaatgttggaggtagggcctggtgagaggtgttggggcagatccctcatggctcagtgctgtcctctcaacagtgaatgaatactcaggagatctgattttttaaaattgtgtgccccctgcaactctcttcctgctcctgctctcaccatgttatgtgcctgctcctgctttgccttctgccatgagtaaatgctccttgaggcttcctgagaagctgagcagatgccagtgccatgcttgtatagcctgtggaaccaggagccaattaaacctcttttctttataaattacccagtctcaggtatttctttatagcaatgcaagaatggcctaatacggtgcgtaaataccattctccaccaaaagggacctcagctccttgaagaattggctgattctaattcagcagtacaggatgggtcttgtagtggaaataaagaagtccttccttactttctggcacaagatattcaagacgcatcctgtactgctgccagatttggccagaaagtaagaaaggacttaaatctgggataatatgatgatcaaaataaataatgatagtaatggatcacatcgtaaataaagagggttctatgaacccatactgatataaaggaataaactgaacatttgataagaaataggatatttatatcatctcaaagtattatatctccctatacagcttaattactaagggcaaaagtaatttacagcacaaaagcctggcaaacatcaccttaatcaagtgatgtgacttaaccccacgagaaataagaaagataaaatcatgtgccactgatagaatgtaataagaatgtaacagcatcacttctataatagtcatgccaaagatatagaacctgtatctaataatgaagagtattatataaccccaaattgaggtaaactctataaattcactggcataataatctccaaaagcaccaaaatcattatagtcaaggaaacattaaggaactgtttccgattttaaaagaccaatgcgacataacaaataattgcaacctgagattctagacggaatcctttttctatgaagtacattatcagaacaactggaaaaacttaaatgtgacctgcagattagatagtagcaatatatcaatgttaacttcctgactttcatggacatattgtgattttgtaacagaatgtcttattgtagaacccttaaagagttttgaagtaaaaaataaaaacttatagaaggagtttaagttgtatgtaaataatatgcactgtaataattcattacacagcagtcctccacttatctgcagcttcactttccatggtttcagttacccacagtcaacagctgtctaaaaatattaaatggacaactccagaaacaaacaattcataggctttaaactgtgtactgttttaaatagagtgatgaaatcgcatcttcttgctccatcccacctgagatgtgaattgtcgcttcgtcaagcacatccaggctatatatgctacctgctcattactacataggaaaaaaaatagcatgtatagggctcagtactatctacagtctcaggcatccactggggctcctgaaacttatcctccacagataacgggggagtactgtataaccattatataattagcatcgatgtagtttgtagcagtagtcatgaaaaaaacactacaagatatatttattctctaagaactctgcttgttttttgtttataattttcatgctatgatatatatcaaagaatagaaaaactacattctgcactgcaaggttaagagcaaataaaattatactacagtagaataatttacaaatcagaagactcaaagggtgatatcatataatcatttattctattagctccttgttccctttttaaaatatgacatgtaggttaagtctgttgaggaaaaggaagatgctttaggctgtagtatcaatattcccatgtcatttttaattctatcactgaagtgattcacacgataaaatattttattttcctacatccctatcaaaaacaaatgaggaaagcaattcacttcatagaaaatagtgctgttaaatcagtctacaaaaatgggagggagcaaacacatttctggtgactaacgttagaaatatccggattctaaaatatgaatttgatcttctatttagttggttatagaactataaacattgcaaactcttaaccttttaagcacgtactcaagtttccaaacaagtttctaaaatataggtaatactaaatgttatagataatacatagcactctgagcatttccaatacaaatcatttactttataaaagttatttggaaaacatttcactacctattttgtatctaataccatattaagaataaaagttgcttgatgttaccatggtttttatgaaaatacataaacatttttttaaaaagaataagacatagtccctgcccttaaaatcagactagtaaggaagagaaaaagtgaaaatagtaattcagtgatacatataataataaagacaggctatgggaacataaatcaaaagcattcatattcccctcttaaagagcttgatctgccaacattggagaaaagggcaatcctacatatccatgatcctgacatacctgcctcaggtaaactaggggagatactgaccgagttaagccaatcagactacctcttcaggaaatctgtagaaagaaaaaatcagtcacacagaagtgagcatcagagattcaaaatcatattttaggaccggtagacattttctgtcatgttcttactgataaaaaaaaaaactaataaaagccagaatggagtaggcacagaaaaacagaggtgagaaatcatgaaggaaaatagtttctgtgatgcccaactatgtcttgtgattggatccgagagtctccagtaccattagtatgagtcccaccccctctttttacttgaatttatctgattgagtttccattccctaaatacctagccaatcctggagagggccctgaaatgctactaaaggaagtaatgcctgagttgagttttctcaaagcaagaggcatcagccattctgggatatttcataaagaggagacagcatgttgaggcacaataaagcacagtccactgagactctgagaacctctgatagctgaagtgtgggactgtaaaccaaaaataaaattctaagccccccaaccaacagacccttcccttggcccagggcattccaaagttaacccgaaaaactagttaaggccatgatgggaagtggaggtcccacaggcctcatttataccctcctcccgttgaaattcaggcacagctgaccaacattaatatcaacacagagaccgtaagattgatagaacagactctttaagtctggtaagaaacatttacagtctattctcttgcatgataaaaccttattctctacaacctcttatcttaacccagacattcctttctattgattccaggtctttagatagtaactctttcaaccaactgccaatcagaaaatctttgaatcctatgaactggaacacagcaccccaccccccaaacttccagttgtcctacctttctggacccaatcaatgcacattttaaatgtattgattgatgtcttatgtctccctaaaatgtataaaaccaagctgtagcccaaccaccttgggcacatgttctcagggtctcctaggttgtgtcattagccactggctactcatatttggctccaaataaatctcttcaaatattttatagagtttcactcttctcatcaacaggatagaagattaagacagtaagaccagagagatatccaaatcttgaaaggcctttaataacatggtaaaatgtttggattccaccattacctgcccttccaccatccttccttcccttcccactgccccaaggttatataagctatggccctgggtcaaagtgctgagttcttcacactttaaaattgttaaaggtgggggcggggacacaaagaagactatgcaacagagatcacatgtggttcccacaaggtctaaaatatgtatgatcagtctcccagtctcccactcccccattaaagaaaaagtttgtctaactctgtagtaagaaattgaaacattttaagtacgtgaactaaatcaagaggaggatttttgcaagatcactaataaaagtatagaagatgggcagcacactatgcataagaaaactggcaaaaaatgacaaaaataagaggtaaatctaaacaacaacaacaacaaaacaaagaaaactggcacaagctactgctaagttgaagggagaataatggtctgaactaaagcagtactatcaaaatgagagtcaaggatcagttatgaaaaaaacaagcagctcacaggatagtctcaaatgcttaacattgtttctagacccttgcatggactgaccactacctcctaaccagtcttaggcttccccttaatctctggctctagctatgcaggcttttaatcagtttcctcccttatatcatccatttcccattcatccattcctttcttagtcaacaccactaacttccgagcttcttccatctactactcccctaccctcaaatttggatctctcatttaccccatcattcagtcaataaacattattgagcacatgcaatagggtaggaatgtgctagacttcagggtatgatgacacagacacagttcctgacctaatggagcttatattttatgatgactgcttctagtaaacttgatcatttaagttagtcaagcagcttaaaattatttaatgcaggtatcacagagtaagaaaaaattatcaagtgttatcacccattctgctttatacttgctttaaaattttttgctttttaaatatataaatgtattgacagatttaaattattttccgaatttttgtcaaaattagaataactatacttttatgcatagttcctcttttgatgtgaacctccagatccaggtgtgacaaaaaacccaatctgcttgtatattttgatatatctaacaaagtctatcactatgttttgaaagattttgtacgccagactacatttattaaattggtattttccttccatatttagaagctacatccccagactgtaaatggcttgagattagaaaaaaaaatttttttttactttatactctaatatcaccattctgtggctggcacacagtattcaataaaggtatgtataagggactgtataacttccaattaacgtttctgatcagcatgagacaactgtggtaataaacttagttgatatcattcaattagaaagcaaataaatttgacattttcattagcttgtacggccctagagtgggtaaactttttgcccaaaatatttttgaaagacagaaaatacctcagattagtttatattattattcttagaagaactgagacctttatatcggaaccctttgctaaagaggggtccctagtcagataaatttaggaaactctatgttaaacaaaattaaatatttaacctaagtcctcattgtgcttttatatgctcacattcattctatctccaaaagacatttccaaatttgctgaatctcagcatctttttttactaaacactatcaatacggtaggacttcagcattctgaagacaactgtctggaaacatctactaaattcggtagtatttgaaagataatcacaaaatgaaaagaatacttttatgttaaaagcttaaaatctcttacctttctagctggtgggccatgagctttatttactctgcttccaggaataccttagctgttatcaataagcagtcctttctcaagtttccatctagtacccttagggaaaaagagaggcagaaaagagtgaacttattaccatgtgggatctaaattaatagcctcttgtatttcaattccatagaatttttaaaaatgttttcttaatatttcaaaaatgtatgtaaattttgcctcccattccatgtttttcaatataaaacttaaggttctccctccaaattgtcaatgctccaggaagatgtttatcctgtagcctcccgtaactcctggcatattaccacctattagaggtattaacaatttcaaggatggaagtaaggcaatgaaaccttggtgaaagtagaaaaatgaaagaggaggagtcatagataacaggtgaaatgtcagtgctgaatttgagcatcaaaatttttagagtggagattaacagtttttcttatgtcattgctgcacaataaaacccatgggacccagtctatgtgcttatttggaaaaagcttgacttttaaatatatgtgtatcagttaggattaggttcagctgttaatgatagaaaactcaaaataacaacggaatgacagaacactcaaaataactggcttaaatgattcagaagtttatttctttcacaaaaaaacataggcaatccagaaccatgatcgcctggaaccaagggtccttatattttgttggtctgccatcctcaacatgtggcttctccttcatggttttaaaaataactgttcaagtaagttctagccatcacatctgctgatcagacagcaagatgagaaaaaggagataagcaatagcctccctttaaggaaatttttcagaaatttcacaggaaacttttatttacatttcatggcttagaacttaatcatatgaccatagctatcggggggataggaaatatgtcctttatttcaccatatgcttaagaactggagcatctaccaataagaaaaaataataggaggaatattggcagacaattagttgtttctgtcctcatacttatttcattctaaaatgtaagatgtccagatacctcatggagatggcttggcaaactactaaagagagttttcgaaagcagaaggtcctgtcaggagccaagactaacattcataaggacttctttaatatgtaaggctaatctataggtgacaaaagaaaggaaaaatatgaagaccagaatgacaacataagagcaaagaaacaacctaaattgttgtagtttggaaaggtaaactcacatactcagtctacaaaactcagaaatgactgctcagaatcattatgtaaataaatggtgtggtcaaggtgagaatgagtaagaacctggcagaaagctcagttaccaaccgcattaagaaaaggcacaatattcaaagagaaagacacttttctctacgttttctcagtgctgagcttccattaccaggtcatataggtattgggagatttccctattgtgcagaatgttggaaagaagggttgcacttaactttgatttcctgacactttcaagattgcttgaaacatgtttaaatatttaatatgtttaaaacactgttgtatcagaaactaaaaactcatttcaaagctggcaacaaaattatgctttatatacaggctgttccttaagggaaaaaggacccaaatagtatattcagccatacaaatgtaaaatagggactacaaaaatggagcagcaattcaaaggacaaatggctctgtgggataatgtaaaggaccacatcttcttgatagagataaatttctgcaaattgtttctttcagagaaatgtttatttttaaagtatggcttcgggttttcctatttgtatagagatatttgggttcttatttcagcagttactcacaaaagaccaggtacaaaagtaattgcggttttttccattaaatacaataccctaaaaaactggaagacaaactggtattgtcatttcaagcaaaaagaaataagatagccagttgtaactggcctgtatagcttatgtcttaacacatgcaatgttaagataatcacccagactttgaacaacattaaaaataacatcctttttttgtaacttgaaaggcacagatgtaaggagcctctgctttgcccccactacctgacttattgtagacgtctttcttacataatcatgcatcacttaacaacagggatacattctttgagaaatgtgaagttaggccaaaacatcattgtgcaaacttcagactatactcacacaaaccttgatgatatagcctattgctcctaggctacaaacctgtacaggatgttactgtactgaatactgttaccatttgtaagaaaatggtatttgtgtatctaaacacagaaagagtacagtaaaaacacagtacaaaagattttaggctgggtgctgtggctcacaccctcacgcccgtaatcacagcactttaggaggcctaggagggtggatcacaaggtcaggagttcgagaccagcctggccaatatggtgaaacccccgtctctactaaaaatacaaaaaattagccgggcatggtggcggatgcctgtagtcccagctacttgggaggctgaggcagaggagaatcgcttgaacccaggaggcagaggttgcagtgagtcgagatcacaccattgcactccagcctgggcgacagagcgagactctgcctcaaagaaaaaaaaaaaaaaaagccaccaccacaaacacactgttcagctatacaaaaatattttcatccttattctaataagcttttttctatcttaaaaatttttaggctgggcatggtggctcacgcctgtaatcccagcactttgggaaaccgaggtgggcggatcacctgaggtcaggagttcaagaccagcgtgaccaacatggacctcatctctactaaaaatacaaaattagccggtgtggtggcacacacctgtaatcccagctactcaggaggctgaggcaggagaatcgcttgaacctgggaggcggcggttgcagtgagccaagattgcaccactgcactccagcctaggcaagaagagcgaaactccatctcaaaaagaaaagaaaaaaaaaatatatatatatatatattttttactttaaaattattttgttaagaactaacacacagatacacacattagcctaggcctacacagggtgacgatcatcagtgtcactgtcttccacctccacatcttgtcccactaggtcttcaggggcaataacatggagccgtgatcacctatgataacaacgccttcttgaagaatacctcctgaaggacctgcctgaggttgttttaaaataaacttttttttaaaaaaaagtaaaagtacactccaaaataatgattaaaaagtatatttaaatacataaaccagtaacatcattgtttatcaaatattacatactgtacgtaattgtgctattttttccttgtcttaatgaaagacaaatgctatacttttatacaactggtagcacagtaggtttgtttacaccaacatcactacaaatgtgagtaatgtgttatactatatcatgatggctaccacatcttatatgtggtctgctgactcaaaatgttgttatgcagcaaatggctatatttggatatcactaacctgtgggtagaatctctgctgaaatgtgcaaacactgctaatggcaaatttcctggtaagagccaaatactgtgacaagaaacagggcccaaaaagtaggcatcagtatgagaaaggaattaatcctctcttgggcatggcctcaaaagtgtgtaacagatgcaagggcaatcctgggtggtggagagaagttagcttctgtccctgtgggaggacaggaggtaggcaggaggtggacagtctttcaaggaggcagtatgggatacagacaaagtggggtatgtattactaaaggtacacactaaggctttccaagggatacttgagcaagacaagttttaagaaaatcagcttctgtatcttcatcttccctttgtttgctttcccaaagatgatctgcctactttcccagagccctcattctcccacttttcacaagaaatccatacctatccccatcccaaatcttattagaatgagttgccctaggttgtagaagcttccatggaacaaaacaaatggataatttaaaataagagtgccttaaaacctccattaatcaagacaccattaaccctcaagcttctggctttccctgtcttacaaatatttctattaaaggcaaagcatagctttaagaattggtgttctgctttgtgtttaggaattcagatatactttattgtatagtgtgatgacagaaagaataacaattttcatttaatgattacctcttccattgtggaaataccatacaaaaatgcattgtccagagagggagttccgcaagaatgaagaaatcagtaaaaaattttgaaaaattaaatgtatatttgctacaaacaagtatgacagagtcattaataaagaattttaaaacattaaaatacattggattcaaataaaattatgttggagaagtcgaaagaaaataaagtttaataagaaaaagggacgctgaaaacttccaactgtgaaatgaattaattcaagcttgttttttaaaaccaatgacagcatcaaatcactatgatatttaggtacttataaaagtggtgtatctggaaaaaacagaaattatatttttttcaacaatttcaatctatgatgaaaattgtaggaatcaactttaaaatgtacaagggtagagaatttatcaagtttcttttcaggagtatatgagtgtattaggcagaatggccttccaaagatgtccataccctaatccctggaacctgttaataggttaccttccaccacaaaaggaacagtgcagatgtaaaaagactacacagatctttgctagccatggtggctcacacctgtaatcccagcactttgggaggccaaggcaggcggatcacctgaggtcaggagttcgagaccagcctggccaacatggtgaaaccccatctctactaaaaatacaaaaattagccaggcgtggtggcgggtgcctgtaatcccagctactcgggaggctgaggcaggaaaattgctttaacctgggaggcggaggttgcagtgagccgagattgcaccattacactccagcctgggtgacagagcaagactctgtctcaaaaaacaaaaaaaaaaaaaaaaaaaaaaaaaaggactacagatccaaaaataagatagattcctgggttatccaggaatctaatcaagagacctcaagagctgagaactttctccatctggagtcagagattcagccagaaaaagaagtcagacaggttagaagcacgagagggatttgacctgccattactggagggggccacatggaaagcacttcagctcctgggagaaaagaccagcccttggctcatagccagtaaggaaagagggacacaaagaaaggaaagacctactgaattcagccaaccacctgaattaacttagaagtggattcttccctagagactccaaaaaggaatgcagctctgccaacgcactcatcttggctttgtaagtccctaagctgaggactcggctgggcccgcctggacttctggcctactaaaactgtgagacaataaatctttattgttttaagatgttaagtaggtggtaatgtatgagtcagaaacagaaaattaatacggtaagaagagttgtaaggtaccaggaagatggacttgtgccccacgacttcaacagcagcaccaccttatagacacagggtattttttttctatttttgtaacattttacataactcataaaacagcatttgtataaaaattcacataaagtttctaaagggcatacaatttccagcaatgtcctgggttttcgtgaaattcagttttctaaagatgcactcaaatcaatggcaaaatgcagacattatgcaatatttcattgtctttggtaaaactattctcattattttgtctcctcacagtattaactctgaaatccactttgtgcaggatctgccattactaggatgtcagaaaaacaataaggctggatctgtaagaggcaagttatttccaaacagcagtaataggaccttggcccccatccccacttcatgtatctatgcagtctatctacacagccacgcagggtgagagctcacaatgaccaatcaggagtcttgagatcccctctcgattgggcaagaagcaaacgtctgggaggaacattggaaactgaggccatctctacaggaacccaagtggccatgctgtggtgtggtcaggccagcgactcttaccaattaaacagccaatatgttcaccactaagtagatcctattgattggttgatgattgctgctgatgtggcccctttcccacaaacataaaaaaataaagggaagatctggggccaacactgaagggggaggggcacgctagcacaatgacactagacacgactttattccctttcaaacatctgttatcatgggctgggcacagtggctcatgcctgtaatcccagcactttgggaggccaaggtgggtggatcacgagatcaggagtttaagaccagcctggccaagatggtgaaaccctttctctactaaaaatacaaaaattagctgagcgtagtggcaggtgcctgtaatcccagctactcagaaggctaacgcagagaactgcttgaacccgggaggcagaggttgcagtgagccgagatcgcgctactgcactccaggctgggtgacagagtgagactctgtctcaaaaaaaaaaaaacaccaatatctgtcatcatgtaggcacagccaaggtgaactgaagcaggatacgaacactcagtacattcatgactatcttcatacattcctgaaatgatcctagagatcaccttgggaatagcaaagtggtcataataacaaacctaaatcaaggagtttgaaaacctgcagccacgacctagtaggacttcacttgcctctcaagactaaagtattttgaattcaggattttttttttttttttttttgagacagggtcttgctctgtaagtacagtggcccaaccatggctcactgcaacctggatctcctgggctcaagtgatcctcccacctcaacctcctcagtaggcggaaccacaggtacacatgccaccacacccagctaaattttttttggagtgaccggtctcacgatgttgcccaggctggtcttgaattccttgagctcaaactcttattttaaattatccagggataattttaaaatggataacttaaaatggatattttaaatggataatttaaaataagagtgccttaaagcttcctgatcctacggcaagaagcaaacgtctggggggaacactggaaactgaggtcatctctacaggaacccaagtggatattttaaatggataatttaaaataagagtgacttaaagcctccattaatcaaggcaatgatcctcctgtattagcctcccaaagtgctgggattgtaggtgtgagccactgcccctggccaggaaaattttaaattgtatgattacactatgatcctctacagtaaaaaaaaaaatacatttcagggctatcaaaatatataaaagtaacatatgtaaaatacacagaatagtgcatgacactaaaatagtatttattaagttcataaattttactgcattttactttgactttaaatgtacatttttctaatgcctaataaatacctaatcttactatcttctttatttttaaggccagaaactgaactacatactcagtttgacttttagataagagttttggccaggcatgatagctcaaccctgtaatcccagcactttgggaggccaaggtaggcagactgcttgaggtcaggagttcaagaccagcctggtcatcatggagaaaccccgtctctactaaaaatacaaaaaaatcagcggggcgtggtggcggagactatagttccagctgctcaaaaggctgaggcatgagaactgcttgagcctgggaggtggagggttcagtgagctgagaacctaccactgtactccagcctgcgcgacagagcaagactccgtctcaaaaaaaaaaaaaagttttatattaatctttaacccatgattctgatgctatctgtaagtttatttgatatataatgtttagttcatcaatttaggtaactcaaattcatcagctgagagaaaaatattaagcccaatgttaacaaggaaagcagcagtattttttcccccactcacagcagacatgagagaggtccttcacacaattcccaagagtatactaaaattttgatgaaatttctcaaagttgatggtacacgtaaaaagtatcacaaacttctccagactgtattatgagtatgtgaagagtgaaatcagttcaatatctcaaaaatattcaattaaaatatcagtagtccaatttttaaattaaatattttttaagtgagtcttgattattcctaggcaatgtaaagaaagcaagtagttttatagtttaaaattataatagaataacaaatacataaatacaaaaaatttacagagtaataattatgaatataaacaacagtagcacaagttgtgctaataacatcaccttagatttggtaacagaattatgtggtctaaggtccatagcattatttttgcccaaggtaggtgataaaatacctttcattgctttttttctcctgagaaacttattttttgtaaaagcaaaaagaaaatagaaatagaaattcagttctccaagaattacagtaattcatagtcatcaccattatgaaaaatacatcaataaaaatttctcattatgaagagggcacaaataaaatacactaccggcttggtgtggtggctcacgcctgtaaccccagcgctttgtgaagctgagatgggaggattacttgaggccaagaattcaagaccaacctgggtaacatagtgagactccatctctacaaaaaattaaaaaattagctgggtatagtagcacatgcctgtagtcccagctactcgggaggctgaggtgggaggatcgctgaagcccaggtgtttgaggcagcagtgaactacgactgcaccaccacactccagcctgggtgacagagaccctgtctctaaaaatgaaataaagtaagactatggattatgtactatgcccattaaaacaatgataagctcacctctttcttccgttttcaaagtatgtcaaaattcaagtaagtaaagtgtattactacaaaaaatatccctcgacccaacatccatatatcaacaatcattaaaacctaccttacaaatgataaaatatttcactgattctcaactttgtggccaaaaattgatagtgtagttataattgtataattagcagagacttcaaaacaactttagaactgtggtattttaatcataatctcaatcccactatggggaaggagaaatgaaaggtttccctagaatgtttataatgggattggtggagtagaagaaaagaatagttggggtggggagcagcctgtaatcccagcactttgtgatactgaggtgggaggatcgcttgagcctgggagtttgagaccagcctgggcaacggcaagaccccatctctacaaaaatttaaaaactagctgagtgtggtggcatgtgagtgtggtcccagctatttgggaggcttaggtgggaagatctctcgagccccagaggtggaagccgcagtgagacttagtcgcatcactgcactccaacctgcatgacagagtaagactttgtctcaaaaatacaaagataattggattttatgaaaatcacagtatcataattttatcatcttaaaataaggatatgctatactgaaggaatttgatacagaaaatgtctgagaaggggtacatatggaacaaaaaaatatgagacattctctcaaatgaatttatgaaaattctaaggtggcatgttcctccacaaattataaattcttagggaaaaataactttgttgccaaagctaccaagtagatggttgctgtactgctttcaagctacagcacaagcatgcctggagggctaggctagattatttctgaatgaacttcaataataattcccacaacacaaactgagtactcattaagttcttgacactgtattaagtattgtatatatatcacatgaatgctcacagcaagactatgagttaaattattctccttaaagagaaggaaactgaggcagagaggttatataatttactcaagataacacagtaagtggtagacccctgataatctggcttctaataactatcctaaaatattgattacacacttaactatgtgccagggacaaaactcagtcaatttggctatcatatactcatatacactttctttattccaagtgtttcctacatggaaatgaatttgtcattataaatcttaataaatcataatgacacattcataagacagaactatgaaatgtatagttcagaaagtaactcttttttttttttttgagacaccgtctcgctctgttgcccaggatagagtgcactggcgtgatcttggctcactgcaacctctgcctcccaggttcgagcaattctcctgcctcagtctcccgagtagctgagattacaggcacccgccatcatgcccagctaatttttgtatttttagtagagatggtgttttctcacattggccaggctggtctcgaactcctgacctcaggtgatccacctgcctaggcctcccaaaatggtgggattacaggcatgagccaccatgcccagcccagaaattaactcttaaactagcattaaaatactcagtgtacaaaccacataaaactgcatgaaatctaagaattattgttaccagtctgtcaaaagttttggtaaactttaaaaga

SEQ ID NO: 260 - DNA, 527 bp, Homo sapiens
ttttttttttttggggaaaatcttttattgtatatatttaaggtgtacaaatgatgttttgacatccattacatagtgaaatgattgctacagtcatgcaaattaaatatgcatttcctcacataattaccctcttttgcagtaagagcacctgaaatctactcttagaaaatttccagtattcaatacagcattattaactatagaacttatgctgtacatgagatctctagatttatacatcttatgtagctgcaactttgtagctttgaccaacatcctcatttcttccacctccatccccctgtgtgtttgacttttttagcttccacatatgagattacgcagtatttttctttctgtgtctggtttgtttcacttagcataataccctccgggttcatccattttgtcataaatagcaggcttttatcaaaaaggcaagggataacaaatgttgatgagggtatggaggaaaggaaaccctggtacattgttggtgggaatgtaaattagtaccccatttt

SEQ ID NO: 261 - DNA, 31737 bp, Homo sapiens
gaattcacagggggctttgctgaggcatgggctgggatatcggggtgggggtggcggtgggatattggggccagagctgtggttttaatgatggccccatcccccactgttctgggacaaagctcaactactcccaggcccacctgcctgaaagcccggggctggtggagccgcagcagctgcactgcgcctgaccagaaccacatctgtgggagtgtctgggagcactggggtgggaccctggggtgcgtgtgctttcttgggtgttactgtgaagcccctacttgctcccaacctcctttttgcaacctagcctcagctcccacctgggaggggccgtagggacacccagaggtgcctgggagagacccctgcctataagactccctgcctataagggcactccgtgtatcccagcgagggacacaaccccacgtgttgctgggggccgtgatctggccagatgggggtgagtcagagagcacctgactacctgcgtaccacctctgggaaggtgttagcactcctggacctacctagcactgccaaatcagattttaaagaaaagtcaataatttttttttttttttgagatggagtttcgttcttgttgcccaggctggagtgcaatggcgtgatcttcgctcactgcaacctccgcctcctgggttcaagtaattctcctgcctcagccaaccaagtagctgggattacaggtgcccgccaccatgcccagctaatttttgtatctttagtagagatggggttttgcaatgttggctaggctggtctcgaactcctgatgtcaggtgatccatctgccttggcctcccaaagtgctgggattacaggcgtgagccaccgcactcagccggaaaagtcaatcatttgaaatctctgatttttaaagtagggcacccagtaacacatttactgggtgttgcaagtgaaacaggtctgtggaccccgtcaggccaaagtctgctctgcagaaacaagacctgacattctttgacgtttgttacaactagatagaggaagcgtctggagaataagacccccactgcccccgctcccagtgctggtgtgcccttcagaacctcatccaccccggctcacatccagattgagtggcgtgccctggtaaccgtgaagacacggagcctgggagactgacctggccctgggcgggtaggcgtctcgcgctacccaagagggctccccagtgaagtgtggggtcagcacgcagcgctctcgggtcagtgaccttcacaaccttatgcgcttccttacacgaggggagcagggcacctggctctgaaggccagcacacctgccttctgtatcgagcacacagagtgcagaaaggaagcgagtaggttttaattcaagatacaggcccctcgcgttgatctcgtagaaggaaactcagtggactgacaagctcaagtcatgtatgaggcacgtcctgggacccccacccctcctgccataggaaggacagctttgggcagagggaaggaggtttgagatcagggttgggcccatacagattgtgtgaggtggtctcaagtacaaatacttatctgaggctcctgaacaggccagaaattggtgagtctcaagtaggtgtctggggaaagagagggaaggggcctgccctcgctccaggggagctggtcgccgtttggcaggcctaacagacctctaaggcacagactggtagcaggagagagctatgtcctgtactccagatgctgggtaaggagcagctggatgtgctcagatggggctaatctgagaaggtggaggtaggagagagggcagaagagagtaagccacttccaaacgtccctccaaaaaatctgaaaggagttactatgctaatgcgctgggcatgaatccaattcagaaccaatctggtgggcccctcatggctcagaaatactctgggtagggctggctgttactgcagtcacggacgctgagttatgtacagagagtacgtcaggaaagtggccttcagagaaagagccccatggcctaaccccaaagtcctagcccgtccaccagcacctctgagttcactggccacggcaccgggctgcttgatctctgggaatgcagcggtggcagcaaagtgcccttggctcacccggctgcaaggtcagcccttcaagctgcttgcagaaacgctggtagtttggggcaaggccttcggctgcaagcttggtgcccagtcctgcctgagacggctgccagagcctgtgcgcgctgcctgaagccttaaagaaaagagatggcggtgtcaaggcgacggtgccacgtgcctggccggggaggcccaggaggggcccggacgaaggcaggctattgaatggcctctggccccaggagcagagtggtctcctctgtccgcacactgagccagccctgtgtgccagggcccaaccgcttctccggccttcgctgggtgaggccttccccagcagggcacgaggccagaggctgggtacactgggtccctgggtgctagttcagctggtcataccccggtctctttctgtacaaacagaagtgctggatgaagaagacgacgtcgaagacgatggagaagaccccgagtccaaacttggttgggtctccgaagatcagcgtccactggtctgttagcagccgggggacagaagctggtgttaggttggcagctcctgaggcagctggagcttgtggggtggtgggcggtgggggtcccagaaaaccacaaagcctccagctacgaaggcccctaggtgggtctctccttgggggctggattggcttggatcccaggtgggggtggagccctggctggaaggtcccgggaaggctggccccgcccgatgccccagccgcagggtggccagcagcccgctggctgactcaccgttgttgtaggactggaggaacatctgcaggaggctgaagctgcccccggtgaagtccaggagcacgttgccaatgctccagccctcagtgcttttgtagtaaaagttcatgtaggcctgggccagacagacggacagacagacggagggcggtgagggctgggcggctgcctcatgcgcctcgtgactgcccctccaaacaaaagcggttctcattcctcccactggggccttggctccaaggacacggtgacctttgggctatgacaggcctcagccaaggaacagtttgggtggtcctgggggtaggcgtctcatctgcatgtacagcaagcaaaggccccgcaccccccacacctcacagctccagcagaggcggggccgatgcggccttccccgtctcctccacatccctggggccaaggccctgtgctagtttccctgtagctatgattcttcttctcacctccaggcaaggctgtccccaaactcagcctggacttcatgtgcttagggactggtgggagtgggacttctggtttggaatcctggctccatcaccggagcctgctgtcttgggcaagtgacagttctcctagccttggtttccccgtctgtagagcggggttaacgccccccacaggcctggccggggcttcctgggtctggttgggggggcgggtctgcggggatgcgccccagtctgactgcctgtgccccacgtcctcccatgctgcagagccctgtgggtcctctgactgctgtgacctttccttccccccgtgaggcaggtcctggcctctctggtggcctcccagtgagcctctagtcagtccctgtctgtgtcccggctcaccctcttccgtacttgctgctgcccctccagcagttccaaacgtctccaacctgggctcctccatccccggtttcttggccccaatccctcccaccctcagggactggggcccacttccccaaaccttcccctcctcggaagccccccccagctcccgggacctgaccccagcttcccagcttcaacatgctcaacactgttcaaccagccacatcccctcactgccgccccgtgtcccgccccagcctctgtgcaggctggcctggcccggaacgcccgggctccttggccacagaacttagtcctgctcagcctaagagtccagtcctgcctcccagtcagaacgctggccctcctgagctcacagaacacgaggctcccagggctgggggcactggaacaaggcttctccctttgggaatggggtgagttaaatgaggccctaggtccccgggtgcagcaacttcagccctgaccctgtcccaggctgtggggcaagatgtgctggaccctgagtccccggatctgaagaggaccggctatgctcataggacgggctgagctctgcgcgggaaggggctccctcctcccacctcacctctccagagtgtcctgctgtggaaatggaggcagtggtgagggcagagccaaaggcatcaggaaaggctggggtgtggagaaggggaaccacccgcacacctgatgcttaggggagcgtggggtccaaggggcctccgctagcgatctcctgtgattccagccccgggggaagagcggcaggctggcctccccaccgccccgctcccgctgggctcccgggctccctgtggctttccgtcctgtttcctcacgccggcaggagctgccccaccggagcagggcctgggccatgtagctctcacctctcctgccaccggccatgtgaacagggccctggaggtacctgtggaaaatacttgaccagcgtgactgcgagcttgatgtaggagaagcagaagagaaactgcagccacgtggtcactcccactgcagccacgatcatggtgacaaatgcgaagagccacgcgagcaccaggaagccgatggcaggccaggacacgcgctggccaccgcgctgggggcgagaggagggcagagatgtggacccacacagaggccacgccggggctgagcaaggacggccccggatagggcgggcttagagaggggcacggaggctggaccctggccttgaaggagcccctgcaaggtgggggctgcactggggttgtggcaggggaacatgtggaccacagaaagcatcacacctgggctggtgctggacatccccagcaccaaccacaccttctcatcgccagggcctcctgttcaggctgcttggactctcaagctctgtctgctttgttcctacttggcagaactgggcgcctctcagcactcacttggagacgtggggtcggaactctggtggcctggtgcctctcccagccaggtactgactcgtcccacgacccggcagcagcctgaggatctcaggaatctgtcccctcgccttgcctttccctgaacacgggcccaatgtgggccaccttcactctcgcttcacaccaaaagctaagaaagcctagaaggttcatacgggtggggccagacagcccccagctggccttacagtgtgaagggaactccctgagagaagggaaagcaaagctgtcatatcaggggtccccggacccagccttggtggggccctgccctgccgacacccatggcttccagcaacaaagctgaatacaggtgtctccgcctgcacgcgggccccctcctggcaccctgaagcccagctgcacccgcctgctcagggtccctctcaaatgccccttggcctctgtgacctgacccctccaggagcccaccctggcccctcccctcctccataggaacttcactcatccttggagcccaaccaagcgtcttcctctgccctcctcccttctgtgccctcctccctcctcccttctgtgccctcctccctcctccctggcagggctcagggccttgcactcctccatgagctgtctgtgctcctctgtgcacggctctcagcctgagtccaggcactgcctctccctgagtccctcaccccagacttggggggctctgagggcctggactcatgggtgtcttctatgcccagcacaggacctggatgaatgaacacacacccttcctttcccaggctctgccgtgtcttctgtcaaaggtgaggtggggtggcgggtgttggctggggtggcctgtggggggccagggctggtctcacctcatacaggcagcactgcacgatgatgatcagcgtgaggacaaccgcgtgcaggctgaagaagacgtcgttgctgttcacggggttcactccgttggggtatttgaggagaaactgctcctgtttggtgggtgggagaagctgggtggtgaggggcagccgggccaccacgccatgtgggcagagatgtagggcaggcaaggccgtaccttgatgtagggcacccagaggaggccgatgttgaatacactgtaggccacgaagcccgtcaggttcagagccacgaagtcgaagctcagaccaatgacactgcagggggtggagggacaagacagggcagggggtgaagactggcaggggtggagggacagggcagagggtgaggactggcgggggtggaggggcagggcagagggtgaggactggcgggggtggaggggcagggcagggtggggggtaaggactggcgaggggtggtggggcagggcagggggtgaggactggcaggggtggaggggcagggcaggggtgaggaccccagggggtgaggactggtggggggtggaggggcagggcagtgggtaaggactggcgggggtggaggggcatggcagggggtgagggctggcgggggtggaagggcatggcagggccaggggcgaggactggcgaggggtggaggggcagggcagggggtgagggctggcgggggtggaagggcatggcagggccaggggtgaggactggcaccactgtggggaatgggagggacagggctcccaggccacggggaaggaggactcggcccttctcaagcagggtactgtccttaggtccctcctgctaccaccacggatgccacctaatccctgccctcttgaagagctacttccctcctcccttcctcccctgcccaagatctccctgcccctcaagtcctggctccagaggggagtcaggaggcccccggaagaaagcgtctccctcccggctctctgcttgccatcacccaggaggccgacgtggccagggtgactgcaggacagcttgtgtctttgcaagtcaaggtgggacagcttcgtcccaaagaccgagactacaggacttgacgccgcaatcctccagggtcggatggacccagcgcagaggagattcacgatggactgccctccctcccccgcccattctccactaaactaaggagccccttttccctgttttcctgctttcccagggaggggctgagctgggcaagggatgaaacgcccagcacgggaatccgacccaggctctccgagccttcgcactgggacaactttctggaaagggtaggcagacagaagggtagaggggacgttggaggctgcgctatcggcagccttgctggaacgccctgctcctaggggccccgagagagcctgcacatacggcccagggggttaccttttccgcctccaattcatgatcacctgagggtagaaggagatggaccaggccacaaagtagatccagccaatcacctggtttatgatgctaatggcgctgctgcggatcacaagaaagcgtatcctcgggctggaaaggagtttggggaccgggatgagctgaggctgggcttctgaaggagactcccacgtgcccagcacggcccccttcttgtcacgtgaggcccgcacaccctgaggccagcctacccggtctgattggagtgatttccatgtagataaacagtaagttgtccaacattttgagatgtcacttgaaaagaggagtttgtcactccaggaggcaccacaacctgttaggaagactgaggttcaatccgatgccacgtacagttaccgaggaccccgctggcatctagctctatgcaacacgctagggaacggagggacgcaccacccgcagcctcaccttccaagagcttactaagcaaaaggagagacgctgcgcccaccagccaacttgaacctcctgttcgccatgctgcccaggctggtctcgaactcctgagctcaagcaatctacccgcctcagcctcccaaagtgctgggattatagatgtgagccaccgcgcctggcctgagtgagactttcctttttttttttttttttgagacggagtctcgctctgtcacccaggctggagtgtagtggagtgatctcggctcactgcaacctctgcctcccgagttcaagcggttctcctgccttaggctcctgagtcccgagtacctgggattacaggtgtgcgccaccatgcccagctaatttttgaatttttagtagagatggactttcactatgttggccaggctggtctcgaactcctgacctcaggtgatccgcccacctcggcctcccaaagtgctgggattacaggcatgagccaccatacctggcctgggtgagactttctgagcagagctatggacttgtcctcatgccctcccctggcttatctctgagggaaggagggatggctctcgtcctcttactggacatgtcaccttgggcaagttattcaagctctgatctcagtttgctcatctgtaaaacgagttaacaaaagtgtctacccttcagggctgccatgaatgacaggatgttcagaaagctgacagcacagagcctggtgcatggcaaacggggccactgctatactacaataccatcacttccacttccatcatcactgggctcctccttgtccacaaaaccatgtgtgccctgtgccagcctggctgccaagtgacaaagcagaggaggcacatacatgaggcacttggcaaagagggcattttcacccttgctgctctgcaatatttggcaaatgctctgcttcaaggaaagtacccggaggcctgcctacaacatctgatctcccaagcatgcctgctgagactttatttttcccccgagatggagttttgctcttgttgcccaggctggagtgcaatggcgcgatctcagctcactgcaaactcctcctcctgggttcaagcgattctcccgcctcagcctcccgagtagctggaattataggcgtgtgccaccacgtctggctaatttttgtatttttagtagagacggggtttcaccatgttggtcagcctggtctcaaactcccagcctcaagtgatccacccaccttggcctcccaaagtgctgggattacaggtgtgagccaccgcacccagtgcttcctgagactcttaaatcctgctgcagtgatggggagcaggatgatatccttactgaacccagctgtctcccctggtccccagcttctgtgctccctggataatactccacccatattgcaggtaccgtgaggatctggctcattagactgcagtggtttcctattattatatatgttttgagatggaatctcactctgttgccagtctggaatgcagtggcatgatcttggctcactgcaatctccgcccccagggttcaagtgattctcctgcctcagcctcctgagtagttgggattacaggtgcccacaaccatacccagctaattttttgtatttttcgtagagatggggtttcgccatgttggccaggctggtctcgatcttctgacctcaggtgatccacccgcttcggcctcccaaagtggtgggattacaggcgtgagccaccatgcccggccttccgagaggcaggtcttgctctgtagctcaggctgtagtgcagtggtgcaactatagctcactgatcactccaactcctgggctcaagcgatcctcccgcctcagcctcctgagtagctgggactacaggcgctctaccacatccttcagtggcttcttaatgaggacccttgaagcactgccttcttgttcttagcatcagaaatcaggggctttggcaggacaactgaaatggtatagcggctgcagcaaagcctggagtccaacttacgtccacgtctcacaaggtacatcttcataacatgtgccactcctggctcttttattttcctgccactcactttttcttatttttaacagatattccttgcaacgttgcttgcatatttgttaagtggccactaaatcccttctggaactaggcagggagaaaatcagtcgattgaccgatacaagacagaatgaagtgataatcgctacctttcactgagtgctttctatgtgccagggacaatcctagacattttttatttttttagatggagttttgctcatgtcacccaggctggagtgcaatggcatgatttcggctcgctgcaacctctgcctcccgggttcaagtgattttcctgcctcagcctcctaagtagctgggattacaggtacttgccaccacgcttggctaatttttgtatttttagtagagactgggtttcatcatgttggccaggctggtcttgagctcccaacctcaggtgatctgcctgcctcggcctcccgaagtgctgggattacaggcatgagccaccgtgcccagtcaatcctagacattttatacttgtttgtgcttttaatcttcacaaggctgtcaagtaaacattattcactgtacagctacgaataaggagacggtgctatattggggtgaagtgccttacccaaggctcacaggcctggctcctagaccactcaactcccatgttctaaccagaggcttccagcatcacgggtagtagaggggagtggtgagagttgggtggggaagggccagtgaggcaggagcctgaaaaggtaggttggtgcccatcaatgccatctcacaccaatggtttgactctcattgttaaagacttttcttttcttttctttttttttgagacagggtctcattctgtcacccaggctggagtgcagtggcgtgatctcagctcactgccacctctgcctcccgggttcaagtgattctcctgcctcagcctcctgagtagctgggattataggcgcacaccactaccacctggctaatttttgtatttttagtagagacggggtttcaccatgttggccaggctggtcttgaactcctgacctcaggtgatccgcccacctcggcctcccaaagtgctgggattacagatgtaatcccacggtgcccagcctctcactgttgaagacttttttaaaaactgaactatgacatataggtagagaagtacacacatcacagcttgatgaaatgtctacagactgaatgcatccagctcccagatgaagaaatgaaacattcccaagtcctcggaacccctgcttgcttcctccagcctccgctggccccgagggtcactgctaccctgactgacaccatggatttgctggatctgtttgtgcttcaggttcaaggactcctacagccaaggcttgtttggtatcttttttgattttaaaaagaggacactttggccaggcgtggtggctcctgtaatcccagcactttgggaggccgaggtgggcggatcgcctgaggccaggagttcaagaccagcctggcaaacatggtgaaaccccatctctactaaaaacacaaaaattagccgggtgtggtggtgtgtgcctgtaatcccagctactcgggaggctggggcaggataattgattaaacttgggaggtggaggttgcggtgagctgagattgcgccattgcactccagcctgggctacaaagtgagactctgtctcaatcaatcaatggccgggccagtggctcacacctgtaatcccagcactttaggaggccgtggcgggtggatcacctcaggtcaggagttcaagaccagcctagtcaacatggtgaaaccccatctctactaaaaatacaaaaattagctgggcctggtggtgggcgcctataatcccagctacttgggaggctgaggcaggagaatcgcttgaacccaggaggcagaggttgcagggagctgagattgcgccactttactccaacctgggcgacagagtgaagctctgtctctaaacaaataaataaaataaaaaataaatgaatacataaaaataaaaagatgacactttgacttcgatgtttggccctaaacgaagcaatcagcatctgttcctcccagagtcagaatttaatctgtggatcagagggctgtgctgtgggaacccaccggctctgcatgctggcctcacaccctgggcaagaggggaggtgtgggaaatggcactaacaaggtgctcaccagcggggagagctccctctcatgcggggtcctcttagctggacactccgagatcccctctcagcaatgctgttatttttaaacattttatttttatttttaattttttagagacagagtcttgctccaacactcaggctggagggcagtggtacagtcatggctcactgcagccttgagttcctgggctcaagtgattctcctgcctcagcctcccaagtagctgggattacaggtgcacatctctgcagccagcgatgctatatttttcagatcacaggttcccacatgctggagactgatcgtgtttcactcctgtttgcttcctagggggctcagagctgatttgcagcccatcttgatgtgcctcatggctactgatctcatccctgcattcttctcctcctgcttccaccagctttattaaggtatcattgacaaataaaaagtgtatatatttgcagtatataacgtgatgctttgatgtatgcatacattgtgaaatgactaaatcaagctaattaatatccatcatctcagatacttatcttttttttgttgttgttacgaacgtgagtagctaggactataggtgcaagccactgcacccagctgtggtgggaacatttaggatctatctcttagcagtttttaggcatgcagtaatacatgattgttaactatatcgccaggttgtacaatagctctccagaagttatgcgccctgagtgacttgcgttcatcttgttatttaaacccttatttgccacctcctctgtggatgctttttatctaattgaatagcaactggctcaaatgctcagtaaggtgggagcagggtacacacaaatagatacatgcataaagctatgggtaatgatcgctattagatcacacggcctctggcactggtttttggaaacgacacccaaccagtggtgtctcagaatgaggcttcacaaaccttaatgtggactcaaaccatttggggatcttgctagtgtgctgactttgaatcagtaggtttgggatggggcctgagatgctgtgttcctaaggaagcccaattctctggtccttgaatgccctttgagcagccaggccttgaaaattgtaagaactttttttttttttttttttgagaaggagtctcactctgtcacccaggctggagtgtagtggggccatctaggctcaccccaacctccgcctcctgggttcaagtgatcctcctgcctcagcctcccaagtggcttggattacaggtgcatgccaccacgactggctaatttttgtatttactttagtagagatggggtttcaccatgttgatcaggctggtctcgaacttcctacctcaggtgacccgctcaccttggcctcccagagtgctgggattacaggcgtgagccaccactcccggtaagaacgtttacattcccagaaccatttttgcctcaggttcctcactatcaccttcttaattccatctaatggcatgtgatactcatccccaaaagacaccaacaaagccaaaatcacagatttctaggttgatggaacaggggccgcctaggagacctgtttccaccagctcttaattcaaatgtgttctgttacctagcatttccctacccatccgttaagattggttacttacttcatcggggagctcaaggatagtaatatttttggaacgaaatgtgatttcaaaagtgatcaccagggttgcatttaatggtggcctgtggaggacaagagtctaattactgctgagaagctggacagtgagatctcaaccaaccctctggatttcacatctggccttcaactctcaagcagttaggcttaggaaatgctaggtgctccaccctgatgggtagccaggtggaaatcgtgctcccgtaggccttcctgtcttaatcaggagaccaggtgtctgtcccttcagggtagggtgagaacagagaagaaagcaaggtgggtgtgaatgacaaatgaggcatctggaggcccaggaccgtggctccctgctccggtgggaaaggcttcccagagagtcgggtctgagtggggccttgtgtgagggccagcatttgactgaaggaggagagggctcaggcagggaatgaggagggagcagtccggacttggaaagctgggagaggcatctgacgggagaaggcagatgtgctggctggaagccgtcttctgggccctggccctgggtttagaggcctggagttaatctgaaaggcagtgggaggccactccaggggcctggacagttgtggtaagagatgacttgtaagatttgcagggggagggtgtgcagagacagaaggagctgggagcggaatggcaggcctgctaggggcctcggaaccaaagctttgctttcaggccagatctcgcaggagaggcgaggaagggggaaaggcataaagagagaaggagagggttctaggtcttcttcatcagggaatcctcacggctgggaggcaagggaaggacaaagcagctaagagcagagaaggcagaggcagcctccctggcacagactggactaggtcgcgacgtttgtgcctaagccagcaggtggcagcaagtgagactcccagacaaggcccagcatgagcggcattcacccgacgtggccactcctgcttctgaaagcaacctcagaagtgccaaccagcagctcagctccctgccccttgaccttcagggctctcttcaaatacttagtcttagaaagaatcgctttgaaatctggcctcaacaccggtcacacaggactcttcccatgcggggaaaagacgcacgtctctgggagaagcaccccttccttctcctgccagggaaagtgaggactcagggtgggggtcagcctttgcgatcccatcctgcagcccggggctagcaccatccctttttctagggcttgtcttacaggtaagaggcaagaatagcgcatctgaaatctgaacagactgagccaggggtcagccctgacccagctgcggggcctgagcggagctgagcacagcgccaggcccaggaacttaccgcagggtgaggctgacgttggtcgagctgccgttctccagctttacgacaggaggaacagtgaggctgacgcttgactctggaaggacccaaatcaatgacatgaggcactgggtcagagttcaggcctgtgacagaaaactgggccgaaacccctgacatctgaactcctgagctctgactctctgacgagccctattctgtgatgggactgcaaacacaggccctggttagcttccttccccacctgctgccagagacagagatggaggaaaacaggcctgagcaggaaacgccggagcgtcctcctcccgctgcgatgacaggctctgagagtctgcggctgagttaaccagagattgttagagaaccatggagcccaaaaatcattacaggggaattccagcgtgacctgggagcgtaaaaggcagccgtgaaccacctcttcagatgaaagcacaggggtctcctctgttcatgaagtcaaaatggtcctgaagaactgggccagcccctttcctgcactctcagagagacacatgggcccagctaatgagtttctaaggagccctttggggtcccttcccaacccagctcaccctggcactggtccccttcctggggctgactatctgcggggtactggaggaggaagggtgaatagttgtttcactctgagatttcttcttggcattaagctgttaactcagaatcaagttgacaaacaggcccccagatgagggaagaagcagatctgggtcttagggtcttagaaaaccatcgtggggctgggcgtggtggctcacgcttagaaacctggcgctttgggaggccaaggcgggaggactgcttgagcccaggagctggagatcagcctgggcaacacagaaagactctgtttctacagaatattttcttaaaaaaagaaagaaaactgggcaggcgtggtggctcatgcctgtaatcccagccttttgggaggccgaggcaggtggatcacgaggtcagaggatcaagaccgtcctggccaacatggtgaaaccctgtctctactaaaaatacaaaaaattagctgggtttggtggcatgcacctgtagtcccggctactttggaggctgaggcagagaactgcttgaacctggaaggcagaggttgcagtgagctgagatcgctactgcattccagcctgggcaacagagcgagactccatctcaaaaaaaaaaaaaaaagaaagaaaaccctcttgcaaggccaactagcccagagcaccggactgagtaagcctctctttgtgtgcttcctgtattctttgtgcagccccgtcccagcctctgctcccaggggtactggaaggctcatgccacacctgccatctcacttcccctgcctgattgccttcagggttacacacagcctggggttatggtcatgactctaggccgggcggggaagcaggtgcatgactgtgatgaggagcgtctttgcaacggcagaggctgccagcatgcccggttccccgacccagaccccgtcactcagaccccccaggcccagttccccccacccagaccctgtcactcagacccctcaaaggcagatgaattgagatctgaaattttagacgcttgggttggaaggaaacttttttttttttttttttttgagacagagtctcgctttgttgcccaggctggagtgcagtggcatgatctttgctcactgcaacctctgcctcctgggttcaagtgattctcctgtctcagccttccaagtagctggaattataggcatgcagcaccacgtctggctaatttttgtatttttagtagagatgaggtttcaccatgttggccaggctggtcttgaactcctgacatcaggtgatctgcctgccttggccttccaaagcgctgggactacaggtgtgagccaccatacctggcccggaaggaaacttaaagttacccaatttgacctctgattctccgcctcaatactcctacctggtagtttctcttcctctgtaacctcgtctcctctaaggagatcacagcctgaagcttgccctgccaggccaggctctgctacccagagcctctcagaccctgagagctgccttctccatgctcagcacatgtgaatacagatggaagctctgtcccaagtccgtaggtccccacagtccacaatctccagtcccctgctggctggctgggctcctcagaacaggatgtcccctggcccttgcagaggccaaggtgctcagagcggcaaaaggcagtcccttccttatgtggagcctcagagcctggaagccgctgtggcgagtctgcccttctttttcaggctcactgttctgaggtcattctgaggatttcttctgggcttgcatagctgggacttcctgtaccaccagttcaattctgcctagagctgaggaccatgccagataagcaagtcccacaaccagccactgctcaggacaggatgctgaaagtgatgctgggcggccagccagactctggatccctagggctctgccagaggtagtggaggtcaaggtgagtgggagatctacatggctacagagctcctacaatctttgcatataggaggttgagggccgggcacagcggctcacacctgtaatcctaacactttgggaggccgaggtaggtggatcacctgaggtcaggatttggagaccagactagccaatatggcgaaaccccatctctaccaaaaagacaaaaaattaggccgggcgcggtggctcaggcctgtaatcccagcattttgggaggccgaggcaggtggatcacgaggtcaggagatagagaccatcctggctaacatagtgaaaccctgtctctactaaaaatacaaaaaattagctgggcgtgatggcaggcgcctgtaatcccagctactcgggaggctgaggcaagagaatcacttgaacccaggaagcgggggctgcagtgagctgagattgcgccactgctctccagcctgggtgacagagtgagactccgtctcaacaaaatagaataaaataaaaaaataaaataggagtttgtgaacactccaagaaccagaccagagaatgtttattccctccttctttagcaccacagaaaactgaggtgctcagcaactgagatattgggctccaaagtcacgcagttccatcctggctctgacacttcctagctgtgtgaccatgggtaaggtacttaccctctctgagcctccatttccttatctgtacagtggggagaataccaagacctatctgaatgagtcatggtgaagatacaatgtagcaatgtttgtaacatgttttccacaaagcccagatgctaaataattgttactattattatcatcacatgataactgcaggatatttttagcccaaggtgggaggcagttaggaagctggccccccaagtctaaaatctttacattgtatcagatttacaaaatgagtcacaacaccatcctgagttcctcctaaagagagtgatcatggctcactgcagctttgaccccgccaggctcaagccatcctcccaccactgccgcctctcacctcagtagctacgaacacaggcatgcaccaccacacccagctaattaaaaaaaaatttttggccgggtgcggtggctcacgcctgtaatcccagcactttgggaggctgaggcggtcagatcacttgaggtcaggagtttgagaccaacctggccaacatggtgaaactctgtctccactgaaaatacaaaaattagccggatgtggtggcgcacgtctacaaacccagctacttgggaggctgaggcactagaatcgcttgaacccgggaggcagaggttgcagtgaactgagatcacgccacattgcactccagcctgtgcaactgagtgagaatccgtttaaaaaaaaatttttttttgtagagatggggtctcactatgtcgctcacgctggtgtcaaattcctgtgcccaagtgatcctccctctttggcctcccaaagtgttgggattacaggtatgagccaccatgcttggccaggtttttaaaattaattcttataggcctctctcccactctgcacctacccaataccagctactctgctatacaccgagctcccattttctaattattacaaaagtgagaggtaggcatttttttttgtttttgagacagagtcttgctctgtcgcccaggctggagtgcagtggcacgatctcgactcactgcaacctctgcctcccgggttcaagcaattctcctgtctcagcctcccgagtagctgggactataggcgcccgccaccacgcccgactaattttttgtatttttggtagagacgggatttcaccatgttagccaggatagtctcgatctcctgaccttgtgatccaccctccttggcctcccaaagggctgggattacaggcgtgagccaacgcgccaggccgaggtaggcattattattcctattttacatttcaggaaactgagcattctaagaggaaaggtttcttgcccacacagcttgaaaatggtgagggcaagattcaaacttaggcctgtctagtccaaagcccaggttcttgccatgaggctgcactgcctcaagattccacccagagaagtcagagacagacaagtctgaaggccaatcatctcatctgtggtccttcataattactacccaaagcaaagagaagaaagaaacagcaagggcagaatgaggttggagattcaattccagtgacttgattttatggtggcttccattcttctttccttttttctttttgagatggggaattgctctgtcacccaggctggagtgcagtggcgtgatctcagctcactgcaacctcctgcctcccgggttcaagcgattctcctacctcagcctcctaagtagctgggcttacaggcgctcgccaccatgcccagctaattttgtatttttagtagagacggggtttcaccatgttggccaggctggtctcgaactcctgacctcaagagatccacccaccttggcctcccaaagtgctgggattacaggcgtgaactacagcacctggcccattcttttctaatggcattcaggaaaggaggcaaagtgatctcatgcagcagggatcctatgcaggtcccagctttgttactttctagctgtgtgactttggggaagccttctaccctctctgggcctgcttcccctccaggtaactggagtggtggtagctggattttttgtttttctcctaggggagcgtgttagcattactaatggggctttaaagagtatgtatgagcgactgggcacacacacacacacacacacacgcccgggcacacatacatgcacgcagacacacacccaggcacacacacacacgcccaggcacacacacacacacacacgcccgggtacacacacacacacaggcccaggcaaatacacgcgcgcgcacactcccaggcacacgcacatgctccagcctcagtcttacaaagtctgatcctacagggtggggacagggttctgacgtctgtattaagaaacaccaggttccagggtctgaaagacctgcctttcccggaaattgcttatccacaaagtgtgactacaaacattactgattgtttaacaaacctggaagagatgatcacgtgaccatgtttcctcagagatgcaagaggccagataacggcaatggtgctaggctctggggaaacctctgcaggatttgtattgtttgtcaaggttcacttgaaatgggaatttaaggtatctgggccaggcacggtggctcatgcctgtaatcccagcactttgggaggccaaggcaggcgagccacgaggtcaggagctcaaaaccagcctggccaacatggtgaaaccccatctctactaaaaatacaaaaaactagctgggcgtagttgcgggtgcctgtaatcccagctactagggaggctgaggcaggagaattgcttgaacccgggaggtggaggttgcagtgggctgagatcgtgccactgcacaccagcctcagcgacagagtgagactctgtctcaaaaaaaaaaaaaaaaaaaaaaaaatatatatatatatatatatatatatgtatctgatttttgtatttgacccaagaggcaagctgaggatcaaatgaatgggcctggcacctttgaagtgctaaacatggctctttatggaaggaattccagagatgttttgggcagtgggagaattgctagaagggcacgggcctcaaagaggcctgcactgaaggtcattcctcctacaaggacgtgtaaactccatcccagcctgtgttccaactgacccctagccctgctgggctgttgcaccctgttcctcagcccctctctaagggacaggttttctcatcttacaaggggatgctgggcagactcctcaggtgatctgtgcctggcagaaccgggtacaacagggtggctacctcttctgcttccccagtgtttcccaggacccaagactctctctgtgaggtccacagggcagaggcataagccattcttcttttttttcttttaaagtcagggtctcaactctgttgcccaggccggagtgcagtagtgtgatcataactcactgtagccttgacttcctgggctcaggcaatcttcctgcctcagcctcccaagtagctaggactataggcacgagccactgcatatggctaatttttaaaaattattttttagtagacatggggtttcactacgttgcccaggttggtctcaaactcctggcctcaagagatcttcctgccttggcctcccaaagctctggaattataggcgtgagccactgctccagcctgagccagtctttaagatattatcccaggttgttggagctctaccgtttgactttgagaatcagctgcatagtctgaccttaagaaccagctgttcactttggtacagaaaggtacagagataccagggcagaaggccaattatatgtggaactatctggctctttgcagaacacctggatcccagacctgggtctgctccaccaccccagtggccacatggccaagaggcagacagagacatgtggtctgaatgattctaaacccttggcaacaaacagatcagattactccttcctctagccaccatttccctctttacaaagttgacgtgtcatttctaaacttaccacatttctctacgagcttcaggggaaaaaggataaaaatagtcagccaattccttatcatgtttctcgatttctcagaactaggaagaaaaacagcaagagagaagttcaggggaatgttgaatcagctcagctccctgtagacaatctgccctctggagcatggatggctcataaaggactgccacctgacagctgtgacctcagggctttgcatcacggcctcagagggacaccctagagaggacttatctttctttgatatacaggggaaacgggctccgagcagataaatgggttgtgtaaagtgcccccctgaggaagtgaacaaagaccagaatttttccctcttcaattgctttttgtaaaaacttagttagcagaaagaaagaatgcaattttactggcttgagattctttttctccaaaagttgttaaaactgtggtcagatatttgacattgtgaacctataaacctcaaggaaattaatttcctttcctgtcctgggataagagtctaagggctgatgacaccaactgacccttaagacttaaaaaaacatttttttttaatatacatatttaaatttttttttttttgagacagagtcttgctctgttgcccaggctggagtgcagtggtgcgaactctgttcactgaaacctccaccccctgggttcaagcaattcttgtgcctcagcctcctgagtagctgggattacaggtgccccccaccatgcccggctaacttttgtatttttagtagagatggggtttcaccatgttggccagcctggtctcaaactcctgacctcgagtgatccgcccgcctcagcctcccaaagtgctggggttacaggtaggagccaccgcgcctgtcaagactttatttgacaagtgtcaccattccaggactggctggggtcattcacaaggaggactcggggagggatgagccccagagcaagtccttggtttagtgtggaagatggggagctgcattcctgtaaacccaagacacagcaggtgaacagtgggtcaagagcagccaggccggcatggatttctgtagcttggtctccgtgctgcctcagtacacagtctcacgggcctcctgcagactgtggggagctctgggtaaggtctgtgtggagacatccctgttcccactctgatttcagtttccccaaggcctccagcatctccggacatctcccttacacactcctcaagaagtctccctggctgctccagctgtctgacctctgttggcccgtctcctccagggttctctctttgcctgctgcaggtctgcctcatctgagacccttctcaccggccgggaatgaccccgtacctactctctggcctcctctgggggccttgctcttggcgctggatccctgtgctctgtcccctgaccttggaggaattgccctcctgcgtgtatggaatgaccacaggcctccctctcactcttgctgccctccgctcctcacacctgccctgtggcctcaagttcaggattcagtttgttgcccaggacagagtctggtttttctccagaaattagatgcagaatcaggcctaaccagcttctcaaactcacagacttggtcagcaaacattcccaagcctcaaaggctgagacccctggaggaacgatgccagcagagacaaaacgacattgagaggtaagtcaattaaaatgttaaaaaacatcagattaggctgagcgcagtggctcgtgtgtgtaattccagcactttgggaggccgaggcagttggatcacttgaagtcaggagttcgagaccagcctggccaacatggtgaatccccgtctctactaaaaatacaaaaattagccaggcgtggtggcatgtgcctgtagtcccagctactcaggaggctgaggcaggagaatcgcttgaacccgggaggtggaggttgcagtgagccgagattgcaccattgcactccagcctgagtgataagagtgaaactccgtctcaaattaaaaaaaaaaaacaaaaaaaaaaccagattgataattacatacaactagtggcttgtgaaagctacaagatagaaatgaagtatctcctgacaatgggctctgtctggcgtgcccttcctatgtaagttctaactattgtccaggcctcattcagatgtcacatgtttcaagaaggctcctcacccattcagtcccttcccaggagcaacctggggctaggggtctagtgtggcagctcctgtctgccaggtatgagttggtcctgtcctctgttctacgacctggaactccctgggtctcctgcttttggagagggtacacaaatagtggcaagggctgtgtgcactggagacaggcttgacctatttattacttatgcgaccttgtggtgccaaacaaggaggtggtaactacctcacaggacttaaatgaggagatgtaaagcacgcattgtcaagtgggactaaaattggctgggggtaggctgggcgcggtggctcacgcctgtcatcccagcactttgggaggccgaggtgagcgcatcacctgaggtcaggagttcgagaccagcctggccaacatggtgaatccccatctctactaaaaatacaaaaattagctgggcatggtggctcaggcctgtagtcccagctactcggaaggctgaggtaggagaatcgcttgaaccccggaggcggaggttgcagtgagccgagatcgcgccactgcactccagcctgggtgacagaggctgcagactccatctcaaaaaaaaaaaaaaaattggcttggggtggtagtgaagaaatctagctattacaatggtttgtggccacagaaacaaatacacagcgtactagtggtattaaattttatgggaagggggtaggtaggaataacgaggttgagaaacaaggatataaagtggttacctctgttgcttagggcgcctagcgagctctcacaaaacacagtaatcctcaatgttactggaagaggcagagctcaggagtcctcccttcgcccagtgtgaaaacccggaggggaggatggggtctcgtgctgctcagtcccccggagccccgcactccgcacgtcaaccggcgctctcgcaaaggttctctcagcgtctccaaagcaatctgcaaattccccaaccgagacccaggcggcaactgagcagaaggtaaggggctgggaacggcacccaccccggcagcccgctgcccctgcctcggctgaccaccgctcgggcccttccacccgggggttgtcccgtgtcgcgaggccagcactggtggcggggaaaggagcccgccgcggctgagggcgctggacccccggcaggctgccccgctgacctgctgtgcctcaaggggtccgcctgggaaacaggggaggccgcgtccgctctcacctgagcgcccccaggctcgaggaaccgccctcacgggacgcatgagcctcgccaggtgccggtcaggaatgcaccgcgttcccctgcccggctagactttgggagaggcgggtccgctgtcacctgacctccgccacctgactcgtggggccggatctcggcgagatgagctctgggagttgtagtttccgcgcgtcttagacggacagagcgcagctgggtcgggccggggcgcagagatcggggctccggcgtgagggaagatgaggtccgctgccagggacacagagactcttggagccgccagcgcctcccggctcctttcgtgagcgaagctcagaccgccctccattgggcggaaatcagagcccgtggggcggggccccctttaggtcccgccttccgccgcctctccgcctatagccggggcccgccgagaggttgcgtggaagctcgccttccccggccagtgggaagacgagaagcctccatgttgggtgtggctgaaagattggcaggcgactccccgcccctgccccgcccccctgggcgaagagcgcggacttgtggggccgctggctgcagactggagctgcgcgggtcagggagataatggctgcgcggccgatcaccctcggcattgacctgggcaccacatctgtgaaggcagctctgctgagggccgcgcccgacgacccatccgggttcgcagtgctggcgagctgtgcccgtgctgcgcgggcagaggcggcggtcgagagcgcggtggccgggccccaggtgagttggacccccggggccgcgccgcctccaggagcctcctgaccacccttttccaccccaggaggcctccctgacagcccttcccgcaatgaagtctctattccagcttgtccccagcttctccaggggcccgtctgcctgcagcagctgtgctcatgatcccttaggtctggtcccagaatccttcccacctgctgggaccgattcccccccgccccctccccgactctctggcttcttctgggggccttgcgcttggcgctggatccctgtgctctctgtcccctgaccttggaggaactgatctcttgtgtgtatggaatgaccacaggcctccctttcactcttgctgctctccgctcctcacacctgccctgtgacctcaagttcaggattcagtttgttgcccagggcagagtctgggttttcctccggaaatcagatgtcaaatcaggcctaactggctcctggctcattccacagaagcagaatgcggaccaagaaacctttggtcagccgggcgcggtggctcacgcctgtaatcccagcgctttgggaggccgaggcgggcggatcacgaggtcaggagatcgagaccatcctggctaacacggtgaaaccccgtctgtactaaaaatacaaaaaattagcggggcgtggtggcgggcgcctgtagtcccagctactcgggaggctgaggcaggagaatggcgcgaacccgggaggcggagcttgcagtgagtcgagatcgctccgttgcactccagcctgggtgacagagcgagactccttcccttccttcccttccttccttccttccttccttccttccttccttccttccttccttccttcattctttcctttctttctctttcttaccaagtctcgctctgttgcccaggctggagtacagtggcgtgatctgggctcactgcaacctccgccaactggattcaagtgattctcctgcttcagcctcccgagtagctgggactacaggtgtgagccaccgcgcccggctactttttgtatttttagtagagacagggtttcgccatgttcgccagactggtcttgaactcctgacctcaagtgatctgcccacttcagcctcccaaagtgctaggattacagttgtgagtcactgcgcctggcccagctttgtttttcacaagctcttgccacatacatggacacggttgtttagggttcagagcccatttggctcagaagcatttctgaggatagggatttcaggagcactttgtatctacatagaagctttcaagattagtttggttgggacattagggcatattaaaaggattcttacttaaaggactatgaattggaggcaaagttggctctgaccctggtggggtgagcaggagagctggcattaggggagagtaggctcagaaagtgccagtttctcctgaaatagagcacttcttttttttttttttttttttttgagacagggtctcgctctgtcacccaggctggagtgcagtggtgcaatctctgctcactgaaacctctgcctcccgggttcaagtgattttcgtgcctcagtttcccgagtagctgggattacaggtgtgcgccaccatgcttggagaatttttttgtatttttggtagagatggggtttcaccatgttggcaaggctggtctcaaactcctgacctcaactgatctgcctgcctcggtttcccaaagtgctgggattacaggtgtgagccaccgcacccagcatggccactttttttttttttttaattgatcactcttgggtgtttctcgcagagggggatttggcagggtcataggacaatagtggagggaaggacagcagataaacaagtgaacaaaggtctctggttttcctaggcagaggaccctgcggccttccgcagtgtttgtgtccctgggtacttgagattagggagtggtgatgactcttaacgggcatgctgccttcaagcatctgtttaacaaagcacatcttgcaccgcccttaatccatttaaccctgagtggacacagcacatgtttgagagagcacagggttgggggtaaggtcacagatcaacaggatcccaaggcagaagaatttttcttagtacggaacaaaatgaaaagtctcccatgtctacttctttctacacagacacagcaaccatccgatttctcaatcttttccccacctttcccccttttctattccacaaaaccgccattgtcatcatggcccattctcaatgagctgttgggtacactacccagacggggtggtggccgggcagaggggctcctcacttcccagtaggggcggcagcacggccacttcttgaaaacttttctgccctccctccccagctttcagcaggctgttctgtgcttacaggctcacccagtgtgtcacacctatttaatgaagtgcttagcggaggccagtcattaacccccccacaccacatatgaatcgtgctctgggacaaacagcactgctgtgagttagtctatatagcagggtttctcaaccttggtgctgctgacattttgggctgcatagtttttgttgtgtgaggggtgtcctgcatgttgtagaatgtttagcaacatctctggcccactagatgccagccacgcttgcccctcttccccagatgtgacaaccaaaaatgtctccatgttgccaaatgttccctaggtgacaagaccaccccgagtaggaaccagtgatctatagtcatatctgtggccgggcgcggtggctcttgcctgtaatcccagcactttgggaggcggaggtgggtggatcacttgaggtcaggagttcgagaccagcctggccaacatggtgaaaccctgtctctactacaaaataacaaaaattagccgggcgtggtgatgcgtgcttgtaatcccagctacttgggaggctgaggcaggagaattgcttgaactcgggaggcagaggttgcagtgagcccagatcataccactgcactccagcctgggcaacagagtaagactctgtctccaaaaaaaaaaaaaaaaaaaaaaaagtaatatctgctggctgtgttctttcctcaagttcatacttttcactcataagtattagctataccagggtcaagcttggcagctgtgcagacaatcagtttttggtatttgcccatttaaaatacaaggttttcgagggcagttctgtgaccctttcacagtttatatttatttttcctctctgggcatcagtttcctccgctgtaaaaagaggcctgaggagtaggatttaatgagcttctaagtactgtgtgcaagtctaaagcgcgaggattcgacgtggatgtagaccaactgatattctgagccaaggagtgggggcaatgtctattcctgttacactgggggtctgtccaagagctactccccaatcacacccgcccctaaaactgtttctaactgctgaacactgcctccttgtctttaccacatccagcctgcttacttcttcccgtgtctccccccacacaactcacgcacccactcaccctgggaccatttgaaacagcagctctgtcctgggatgacacaccaccccatggccatgtggagtcttactgtgttgctgaggctggtctcaggctggtctcaaagttctgggatcaagtgatctcctgcttcaaccttcccagtggctgcgattataggcgtgagccgctgcgcccagctgggaggactctttaaactagctctgtccagtagaaatatgacctgcaggccaggcgcggtggctcacgcctgtaatgccagcactttgggaggccgaggcgggcgaatcacgaggtcaagagatcgagaccatcctggccaacatggtgaaaccccgtctctactaaaaatacaaaaattagccgggtgtggtggcgcgcacctatagtcccaggtacttgggaggctgaggcaggagactcgcatgaacctgggaggcagacgatgcagtgagctgagatcacaccactgcactccaacctggtgacagtgagattccgtctcaaaaaaaaagaaatgtaacctacaaatggagccaggcgtggccttttcaattttctagcagccctattaaaataaacaagtgaaattaattttaattgcatattttatttaacccagtgtatccagcacattatcagtttgatgtgtgataatcaaggctgggtgcggtggctcacacctgtaatcccagcactttgggaggccgaggtgggtgaatccctgaggccaggagtttgagaccagcctggccaacgtggcgaaaccccgtctctactaaaaatacaaaaattagcccggcgtggtggtgtgagcctgtaatcccagctactccggaggctaaggcaggagaatcacttgaacctgggaggcagaggttgcagtgagccaagattatgccactgcactctagcctgagcaatagagagagactctatcgctaaaaaaaaaaaaaaaaaaaaaaaaaaagcattaaattagatagtgtatattttttgtcatactaaattgtagtccggtgcatgttttacatttacatgtcaattcagactagccacaagtggctaacgatttcagtattggacagtgagggtctaaacaaatgtctattcccagaacccttcttcctgccccccacccccatgtccccaccctgctcttctttcctccctctggtgatcctgcatagccacctggctcctctgtgcctcttgtcttccacttcctcttggctgtggcctctcttgcatgtagaatccttgttgagctctggggctgcttcctaggaaaaggctgtgcttcccctgtactccctgc

SEQ ID NO: 262 - DNA, 400 bp, Homo sapiens
tttttttaaaagaatgatgcacattttaataaagcacagcacaaactgttctttccactccgggctggcagtgtatgtctatccgtcgggcccaccagctgctctgcccagtccaataacactttcccttccgcagcctcctcgtttggacccagccttaggggcccgcccttccgcctttcaacctacgccacttcactcctctcgtatcttgctggtcctgacccctcctgggcagcctttcccttgggccctgccctggtccatctctctaaccctctggtgattctccggtgaaattcacatcactgtgctggaccctggcaacccacagaagcggggaacaggaggaaagaggtggaccgacaagtaacatagaatacagccataggccacccac

SEQ ID NO: 263 - DNA, 31737 bp, Homo sapiens
gaattcggcttcagtgaaaggggctgtggtcatgagacaaaggaagagatggcttcaaatgagttcccttcctccatgggaccagaccttcatgatccttctttccccagtaagtccacctttacctcagcaccaccaccctcagccccttcacaaatgacctaaactcccaactgctgatgtgctggagctcctctggccgcagtccacagagagtataacccagcgctgtcagatgaacgaagtccaggtggctcacatgccgaccactctgccgtaggaaactggagaccacaatgcggagctggggtggggggtgggagaagaggggaaggaggaaagttatggagaattaatggacagggaagtgataggtgttactgggttatattctgttactattaagacctaaggagtcatggggaaggctgaggactcagaaaagaaaaggaaagaaaaagaggaagcctccaggaaaagaggtaggagacagtattatgtgtccagggcctcagagtgaataaatcagagtcctgaaggtcactagtatggggtatcaacaaaagatagaaagaaggaccaggtagggtcacaggaaaaaaattccttgggctttagatgatctatagggctgggtctgtgggatgggtgtttgggaagccgtagggaggaggaaaagtgttacctgagtggtgctccagccatctatctgccccagggtgctcagcactccccagtccactaggatcagctcctgtagttcccgatctcctagacctattaagagcctaccaagctgcaggatctgctcaggacgaaatccccgggggggaccccacaactaggagaaagacaggaacaatgtgagtggaaaagcagtggattgggagtcatactgctgggttttaaatcttgcctctgcccttagctgtataactctaggtaaatcatttgccttttctttagtttcctccactataaaatgagaccgttgccttacagttcctctaaggtgttttgaaagacattacaatcagtggaaaagaagagcaaactaactctagtccatgagttccacacttttatgtgcatcagacacagagacgcttattaaaacagatgcctagggcccagcacagtggctaacagctgtaatcccagcactttgggaggctgaggtgggaggattgcttgagcccagaagttcgagaccatcctgggcaacatagtgaaaccccatctctaccaaagatacaaaaattagccaggtgtggtgcacctgtagtcccagctacttgagaggctgaggcaggaggatcgtttgaacccaggatgtagaggttacagtgagccaagatcacaccactgcactccagcctggatgctgggtgacagagtgagactctgtctcaaaaaaaaaaaaaaaaaaaaaaaaaaggagatgcagatgtctagactctttcccccagaggcttattttttaatttatgagacagggtcttgctctgacacccaggctggagggcagtggtgcgatcttggcacattgcaccctccacctcctgcactcatgggattctcctaccccagcctcctgagtagctgggattacaggcatgtgccgccacacccagctaatgttttttctatttttagtagagacagggtttcaccatgttgcccagtctggtctctaactcctgggctcaagcaatccacctgcctccgcctcccaaagtgctgtgattacaggcatgagtcactgcgcccagcctccccaaaggtttttattaagtcagtgaagcatggtaatctggcactggcactgttcccatgctcagttcagcagcacataccccaaaaaattggaatgatacagagatttgcatggcgcctgtgcaaggataacacgcaaattcatgaagcatgccttttttttttttttttttttttgagatggagtcttgctctgtcacccaggatggagtgcattggcttgacttcggctcactgcaagctccccctcccaggttcacgccattctcctgcctcagcctcccaagtagctaggacaacaagtgtgcaccaccatgcccggctaacttttttgtatttttagtagagaccgtgtttcgccgtgttagacaggatggtcttgatctcctgacctcgtgatctgcccgccttggcctcccaaagttctgagattataggcgtgagccgctgcacccagccgaagcatgccattatttttttaagaaagaaaaaaaataaagaaaaaaatctgttcccttgatgatcgtgatatgcattaaaatttggtaaccactgctttcgtccctctattcattatactagctctctttcctcaatatttatctcccttcacctcctacttgtgacccaaatcttctaactcttctatctcttgcttcccccacctctcatccaactctccattctctttgtgtcctacatcacacccaaatagcttcctcatggccaaccccagttggctctccatccctaacctgttttgctttgcccatggctgcccgcagttcctcaggcccaagtcctgggtctcctgcaaataatgtcaggcagtcctcaaagtctgagagctccatctctgcaatctgggttgcagaccaggctgctgggaatgtccctcgtacatctgcacaatttggcacaggttctgaagggggaaggcagggccaggaggtcagcatagtaataaaatatgcccagagagatatctgtagatagagtgagtcttccaacctttggaggatagagcactgtgagaaatagggatcaaaggagtattacagagtaatatgtatagggcttaggagataatagaacaagaagtgattggagatgccaagacttttatagatggaagactgaggatgttattcagagatttaatggtagcactgaatttgaacccagttctccagcctcacaatgtctccttcaaagcttctagggatctccccagcagagagctccacacttagccgagctagagctgagtctagagcagacacgagagagcaggaaaatggaagttctgggctaaaagaaaacttaatagtttacaaactcccagaactacagaattctagaactacaagaggcttgaagatcatccctctaaactctttgctttataaattagaaaacccagtcccagggaagagcacatgtagaacccagaccgtttgatactccctgtacatcctgctggacatataagtatttgggtagtttcacctggaagatcctcagcagctggtcgcaccacccctgctaccagggctgctttcttggcagcaagctgtggctccctacacagctgtccaactctgctctgctcccagctctgctgcttttctagaagccgctccagggtctctggacccaaggcctcctgcatgagaaggtagaaggagagtggggagatctggacagatcaggacctgctgctatagctctaagtccaaagtcctgtctctgttttgcagtatccccccagatctaggcttcatatcctttgccctctttggccacgggtccccataaccagctcaccagtcccctctatgcatttactcccttcccttcttccttcatctcaccctggggatcaaggaaattgcctcagtagacagagtgaatactaggcgtccagcttgctctacttcatcctggctccacaactctggtttcctggggacaggaagaaaatcgggggctggggagctgagggaactgtgaggaaaaggaaggggaaaagaggacatgctaggatttcggacacagggctccaggggaccttaagaatatggaacaggctgccactgatgatggtggctgacggactgggtatagaatgagttagaatctgaagttctcgaaggtccatacccaagaacagactcctgcaatagcagccatcccagctctgtggcaaatgtctctcctaggcagaagccttgcagctgactgagatgggacagcaggatctgtagggggatctgtcgtgtgctctctgtccccaggaatccaaccaaagggcctaaggtctccagcacttcccctgagactggagtctcctttggagcctggagaagagcatcagaacttggacaatgcacttctgactcagaataccagacaccttgatcaagacaccaagccccctaaccttccctccctcctgctcccagctcagcaccctatgatgctcactacctttgttcacttccttaagcaatgagcccagataggagcaggcagaaagactgagaggtggactccaagagatttctcggactccaagaggtatggacaagtaacgtgaagcatattatcaaggaacagaacccagaggcaaaacaggggccaggccttgtagacaggaatctgtttggcagcaagaaagcaagaagtagagggttgggggacagtcagagagcattgtctgaggagcaagaattgcccagggcagcaaatctgagtctggtagggtggactcttaccaggttttgtagtgccctctctgccagggctgcctggcggaggggggtcagtgccagcagctgctctggagctctttgcaccagctccaccaccaacataatggattcattggatagtctgtccatcaactggatcctattacagcaatttgacaacaacaggattcaggtggagctgggccaagtcgagaagggaccacaaaaccccacagtccgcagctaagatgtgaccccagaccaaatttagtgaagctggacaggaactgatagtaaacagctccagggccaattcccaccatcaagcttgagtgggggagaaaaagggagcaacatatttctagtcttcctaaaaaaaaaaataacgaacaatcctacctgatctaatggactcaaaagctccaaatattaagtaccattaacatttccccattttatagattaaaaaactgaggttcacagagatcaaatgttgaggtctctcactcccaattcccgtttttttccacaggaccacccttcctctgcttgtgaagaggtcccttcttgtttgtacgtgctatacaatttacaaagttctttcaggtgttatctcatttgatcctacaacaagacctggcctcactccatcactcaggctggagcacagtggtgctgcgatctcagttcactgcaacccgcacctcccaggttcaagcaattctcgtgcctcagcctcccgaatagctggaattacacgcacgtgccaccacgcccagctaacttttgtatttttagtagagatggtgttttgccatgttggccagtctggtcttgaacacctgacctccgtgatccacccaccttggcctccccaaatgctgggattataggcatgagccactgcacccagacaaaataggtgtttctcttatccttctttcacaaatgagaaactcaagttttttgatgcatggtctaggatctttcacctcatctgtaaccttgggattctaaattatctcacagaacccacatatttaaacagatctgaatggcattaaaaaaaagtaaaaacaggccggacgcagtggctcatgcctgtaatcccagcactttgggaggccgaggcaggcagatcacagggtcagaaattcgagaccaccctgagcaacatggtgaaaccccgtctctactaaaaatgcaaaaattagccgggtgtggtggcacgcgcctgtaatcccagctactcagcaggctgaggcaggagaattgcttgaaccccagagggagaggttgcagtgagccgagatggcaccattgcactccagcctgggtgacagagcgagactctgtctcaaaaatataaataaataaacaaataaataaataaatcccttttacccgaaatcagaggtgataacctgtaccctacctaggattaccagttctggaactgggctaagtcatacaagagctgaaatctgtggaaaggcctataaaaatataagaatgttgggaagccgaggtgggcagatcacttgaagccaggagttcaagaccagcctggccaacatggtgaaagctcgtccctacaacaaatacaaaaattagcctggcatggtggtgcacacctacagtcccagctactcgggagactgaggcaggagaattgcttgaacctggaagatggaggttgcagtgagccgagatcacgtcactgcactccagccttggtgacacagcaaaactctgtctcaaaaaaaaaaaaaaagaaaaaaaagaaaaaagtaggaatgaagtcaactgcttttactccacttcagctccatattccccaggaagactgtaacaccagcattttcctatcctgacttacagtgcggatggcaacggggtggtggtaggggtaaaatgagaaaagcagcatatgagtaacatactaataaatttctccatgggtagggaggagccttgggttcctatagccttttcttcccacaacctgtatatgaacgtgctctacaacattcctgccatggggccatctggcttaggctcgaacagctccaaggaccaggaactcactaccttagtttttcttatactatgtaaaaatctgatctccgttaactactcttagtcttgcccaatggggccactcataaatatgacaatctaatttctacttgatagcccctcaggtatttgaaggtatttatcacatttttcatatatttttctctcgatctactcctctgaatgcactaagaacacagtgccctgagcaaactacaatcctctggggcagatttggagcattgcctccctcacttcagatgctctgtctcaatctcaattaatgtggactaggttattgtaagattacttggcaggcttcaatacagtgttgccaccctcagctgccctgtgctggagcatattctgggaaccagtcaatacatagagcaactttgaataaaatcctctgctttgggctataaattatgtcagggaactaccagacagaaaaactacctcctccagggcattccctaagggcagatcttcaccccagattgagctttctgaggggccaatatctctagctgcagtacttacggtaagtccaggagtagcttgctatccagcccgttcagttctggccctacagttgtccattctggttctggcattgccatcctccgctgtagctctgcccagatacaggccctctgtagggaagcagtgtgaggccagagcagaacataggagctgggttctatacctagggtcccagcctccctgctcccactaaagtccaggcaccccctctcaccaggctccctcgaactctagtgggcagctgatagatcatgtgcaccacttcaaggaagtctaccatggagttgatctgctgcagaaactcacaggacatgcctcctgccagggtgcccagagccctgtgggtgtgtgagtggggagaggctcattcaacacatacaacagcctgtttgctccttgatatcagtactctcaacacaagtacagatgttcatccaccgtaatttatggtttgagaaatgtttttacatagatatctcatcagctccccataacatcactgctgtttatcagaggagaaaataaggatttatggaagtcaggtgacattcccaacatcattctgctagaaatgtggtaaactgaaactagagccatgtcttagattctgaagcccttgggaggctgaggcgggtggatcacctgaggtcaggagtttgagaccagcctggccaaaatggtgaaaccccatctctactaaaaatacaaaaattagctgggtatggtggcacattcctgtaatcccagctactccagaggctgagacaggagaatcgcttgaacctgggaggcagaggttgcagtgagccgaaatcgcgccactgcactccagcctgggcaacagagcaagactgtctcgaaaaaaaaaaaaaaaaaagattctgaagcccattgttcttctaatgtgggtgtaagtaaagtgataccttcttattcctatttattcttgcttggccagtgcctctgaagtcatcctgaagtaaactaacagtagcaaatgactactgggactttacaatggaccaaacactgtgttaaatatcttacatgacctacctcatttaatcttcacagtaactacctatgaggctggtgccattgtaattctcatttaaagaagggaaaactgacacagggacgttaaatgacttgcccaagaggacaagtaggtgacaggactggaacctgaatccaggttttctgagtcctttggctctagtcaggataggcatggcactgtggaaggaaaggagggcaaagggaggtgctaggagaacgtccacgaggcagggactatgcatcattcatccctatatcccccattccatatcacatggtgcctggcacatagtaagcactcaaaaaaatgttggtcgaattcagcgcactgctcaacacaagttactcactgcagattcctgagggtaaggttggtgggtacttgcatcttcttccagagaaactgtgcctacaagagaaagaaagacgagccccttcccagaagagacactgtccaaggataccccctagagtggagaggcaggactgccttggacccagtcctgcctcctcactctgtgggacccaccagcctcccactctcccagatgcccactcttctctcgagagtgagaaagaaatgaaagaaaagggaaggagaaagaaaaagaaaagcaagtcacattataagagatactagggggctgggtgcagtggctcaggtctgtaatcccagcactttgggaggccaaggcaggaggattgcttgaggccaggagttcaagaccaatctggacagcatagtacctcaacatagtgtctccacatagtgtccacatttttgtattgtctgtctctacaaaaaatttaaaaattggccgggcatggtggctcacacctgtaatcccagcactttgagaggcagaggcaggcagatcacaaggtcagcagttcgagaccagcctggccaatatggtgaaaccctgtctctactaaaacaaaaaaaaaattagccaggcattgtggggagtgcctgtagtcccagttactcgggaggctgaggcaggagaatcgcttgaacccgggagacagaggttgcagtgagccaagcttgtgccactgtactcaagcctgggtgacagagcaagacttcatctcaaaaaacaaaaaaaaaatttaaaaattagccaggcatggtggtaaccacctgtcgtcctagctattcaggaggctgaggcagaaagattgcctgagctcaggagtttgaggttacagcgaactctgatcatgccactgcactgcagcctgggcaacagagtgagactgtatctcaaacaatcaaataaaggatagtagggataagctggccaaatagggctaagggataggtaaagaaggtagactacattgagggaggaagttctgaaattaagtggggagaattacctgctgctcagaccagggcagctcccagtagcgtcttcgatttgccagaagagccaaggaatccagttgtagcagctttaatgggagcaggggaagcaggcagtctggccaggtggtgggaataggctgctggcggtgatgggtatagcagtgtagtgataggtgagagagtctgtacttagcactcagagaaaaggaaccatgggggtggaaagggaccaaagctaggacagaagtggaatggcatttgccactgtagcaataaacgcctaagagcctcacactgcaggctgctgtggtcaagtgttgctgctagttaggcaccaggcaaacaaagtcccttagcttctcccagccttggtcttttcatctgaaagcagggtgggtggcctggaagatttctcaggcccttccagctttgacattagtctaggacaatgtgagtggatcatgctgtcctgcatctggcactggggagggctgctaatgggcacagagctaaccagaactctcagggccactgcagggtagtgtgggaggtagcaccagccatatgaaactgccccagaatggggagaggagctcagttgggagatctcacacttacctgaccagggatacacacagctggaccagcacctgttgtacccatatttttaacaccatctttaacctgcatgagaattggttgtgtgtgtgtgtgtgtgtgtgtgtgtgtgtgtgtgtgtctgtgtgtgtgtgtaagtggggaggtatgaaaggccttccctggcctcagggaagatgccttcctcccaaccagaaagagccggtatccctgattatctcatcctccttgccactctcatacccgaaaggtctgcagcagtgctgcggtctggcaggctgagaggcgtgacagttcaggggccaggcaggaacaagccccgaccaggactcgcctagggatggcctggagtgtctgggggctgaggcctggtagcagaaggtgcaaggagcagagttcctccagggatagctaaagagcaagagagacaagaggcctgaagaagaagggaagggtgttggggaagacaacaatcacaatgcagcaaggcagtaagtatgaggggagcggagagagaggaggggcagatgcaggagccaggttaaaagaggatagagacctctggcgggaggctgagaagttgctgctactcacatcgtgcctaggaaggagccgtccaagcagcaggacagcctgtgttgggatgggaccgaaaacaacagctctcaggacccagcagccaggtcctaagtgggttcctaaggcaaaccctccaaaacttcccgctgcctcttaaccatccccagtaaccatcctcagtgactcaggtcccttcttgatctgaggaaagggaatgaaggcgtcctcctgcagacagagtttacctctactgttcacccagggaaaggaggggctgcttttatccctgaatgggattctcttgactggggctcaagcggggatggagggtacatgccagggagtgagacaggcaaacctgagcaggtgtaacactagttccctgcaggacaggaagcatggctctaagctggggctctgacagctcctgaaggaagcggaggcccagctgagagaagagaggggcccagacccgcagctcccgggggctcagcaccgctcctccagatgagcgcaacacacccagaagttcatatgccacctgtaaccaaagaaggtttaggactggagagaaaagacagatgaaccttgaacttcctctctaatcccacatctgaatttcccagggcctgggctagggtttggaactagggattggactggagtagattaggttcaaaatggcaaagggtatgtttggggtgctacagaccagatagagaagggccaggaagaggtggtaacaggtaagaatggccatggagtaaggaatggaggttgcaaaagtgggatgggggctggcaccactgtgctcaagttgacacaatgggaaagccatccacacagacccaggggaagcctaaagtcttgtaggcttgtgctgaggggctcacccgtccttctgggctgagggtcccattggctgcacattccagcagcccccgttctactggccccgttggatcactcaggggcactaggctctgcagctcctcagggctcaggaaacaggcgaggggcccaagcctgaggagggcatgaagctgacctttgtgtggtccccaagactagcactaaggcaggcctggcagcagatggcatgggtacatacactgggcactctgacactacaccactacacaggggcaccatctatagacctctctcctggaactctatgctgcctgaggccactgcctactctcttgcccctttcttcctagaacaccgacccagcgtgacagctgtgccttcctctctctacctcttccactcttgccttggttactgatcccacaacaactcacctgcgtacctgctcctcaccatcctggacactctggtttaccaggctgcgcagcacatggcgggcatgccctggccccagacctgctgctggccagctatcctccagggcctggatctgagatggggaaggttagctcgcactggggtcactatagggttcttgcagggaggggccactgagagacatgccattgactctttgtccccactagcagaagatgggccagtcaagtaaagaagatgattctcatacctggtgagggctgagctgcaaaaagttctccagagggaggtgggggagcaggggcagcactgcccacagcagctcctggggccaggcaggcacttccccaaacagttcaggggccagcagtcgctttgccagagcctccttctgttcaggcctcattcctgggctgtaatcccggatggcagccaggctgcgaggagtcatgggtcttaaccctttgtcttcctccaaactgttttcctctgaccctctgtagccctgctgtctagataggaaggagactctccctgtttttttgttttgttttgttttttgttttttttaagacggagtctcgctctgtcacccaggctggagtgcagtggcacgatcttggctcactgcaacctctgcctcccaggttcaagctatcctcctgcctcagcctccagagtaactgggactacaagcgcccaccaccatgcctggctaatttttgtagtttaatagagacggggtttcaccatattggtcaggctggtctcgaactcactaggcggacctagtgatccacctgcctcgggctcccaacgtgctgggattacaggcatgagccaccacgcccatcctctccctggttttaatagagaggagctctctgatccttttgtagttcattagcataatgattgggttttcacactcaggcgtgagatgtgcctctctcaaaccttgctacgatgttggcacattgcctatctggcatgaaagaaaaaaacagagaggagctccggaaggggctgctccaggtggatggggttggcctgaccgtgacaggagcaggaggagtagtgcaagaaccttacacactgtcgttggctaacagggatggtgggaagcgcatcaggtcagagacagccaagaaagggatgagtggtgacaggtcaatgaagagctgggaggtgaggcgtgggtaccgctggagcagcagggctgtcaggcgacccagggcctgctcctcggatggtggtacctgtaggggcacaggaatggattctgcctctggagatgctcagtatccctgccatttcctctctggagttcctcctcccactaaagcaagccctctgaacactaggctccaggtgcccttgctcccctttctcagtgctcacctgcagcttcccctgcagcttcccctgcagcatgagtgtcaggaagccctgtgcagcctccctctctgctgaaagcaccagctgctggaggttttctgggggcatatgcaggtacgcctgcgaataggaggtcatggtgggtatggcctcacctcacggggcagggacctccagccatggctgtcacccagcccacccatgtgccctccacctgttacctgcactagaatctgcagggcccaaacactcttttccctctggagcagatcccacagcacaggctggtgggaagaaagacaatatgccaacagagctgtcttctctgtctctcctgcagctcccccaggcattccaactccacttgctgggatgcttgtccatcatctcaagtgtgattcttcagatattaagctcttttaggtccgggatcatatctctaatttctcttgtaccctctcccatgccaggtccatagttggctcaattaatacttgtagacctgaaccaaatactatgagactatctaattccattttactgggcccagggtttgaaaaaggtggccccaacatggagtaagacatctttatatatcctacagaacctagcaaagtgccttgcatataataggcactcagtgaattaattatggtgtttaacatattctcacccctccattctacagactaaaaactgaagcccagaaaaactaaatgaaattgcttgcctaagatcacactaatttgtggcacagttgaacctagaaccaaagtcttctgattggtagtgtccctgaatctttctcattcctaccttatcttcctgtattctgccagcctccaattctcactctctaggggaaaaatttagagtcctctaacttgatcctttttctttctggtgcagaaagtgagagagtcaaagagcccaaaagaataacaaggtaatatttattgcatgtttgtgtatcatgcactgtgctaagcccacagcatgtattatctcatataccattatcatccctagtttataaatgagacgagaaaaatattgctcagagaagttaaataactcattcaaggctggtcacagaaccaagatatgaatccaagcctgtctgactctagagctgtgtgcttcaactactaccccacactactgcctctgagtattcgaggaattcccctggagggccttctcactgttctaggagctttccctctggcagagcactcacactaaagcaggccagcagctccatcttgcttataccagagctggggttgacagtgggttcaaagcctgatggggttggctgctcctcatcttgttccaggtattccccaatcgtccgtagcacactgcgccggccctctgggcgaaaggcatcccagaaggagcagttgtctgggagactggagagcagtagggcccgacccagcatcccctgggcctcagcgcccccagcccctggacccaagaggaaggtcagcaggcggaggagatagtgtaggcgtgtggggtgagcaagagctgggacagaggactgacagcgtggcaactgggatagcatgccaaggaggaaggggccaggggtcagacagagtggggatggtcccagtggtggcagagagggcagaagggggcccagcagcccttctaggaagcaagtgtcattgcccccacgacttatcctgcattggcctgctagccaaggccagaagggcaccaggacctcatacatggtgtcattggcacagaccatcaccaggaagctgcccccatccgggcagcgttccccacagggtccaatgtggcatggtggggaggcagtgacatctggggtggggccctggcacacatgctggacccaagcctggttgctggggggcacagcctgtagacttgcctccccacacagtcgctcagcccacagagtctcattctccaagaagcagccccaaaagatgtctggggtgaggggaacagggggcaggccttcagggcagctggtagggggtgggagcaggccagcacagagccgcttcaccaggcggcggttggagccagacagggctgaaaaggagaggttactgcagatcgcatccaaaaactcatcaggaaactggtcgtggcaggcctgtagccagccttgggcacctggtgcccaggacactgcataccacacagctgtctggcagatggcagtggtgctgggatggggctgtggagtggcaggcttggtgtgctggcagagcaagtggatggagaagttggaaatgctgtagggtggtgctgggcctaagtggttctcacagagggcctccacagtgatggctcgccgttggcgtgggctgatgtgggctgacggctgagaagctctgggcagaggcacgcccgtgctcaggcagtgaaggagggcagggggtgggggtggtgatccagacagaaagcccagcgcctggacatcccaggaaaggttgtgccggacgcccctgggtgcagagggaggagcaggcaggatctggtcagttcacatttcctccagctgaagattctgaccctgactcagagccctcaaggggcatggcaagcataggcttttctacaagcgaggtccctgagagtttaggcattactggttgaaatgctgcaacggggcaaaaaagagaaagctgccctgccaaggtccaaaatcacctaggagaagccccagttggaattctttctgtccacctggcccccttctgtctcctttcttcgtatgcttttagatagcttaaacacaaccctcagcgggcctcatgttaggaaatctgctcagcaactcaatatgtctaactactgtctggcattgttgtactgaagtagtaagggggtagaggaatccagctgtgtccttattttccaaatcccatctttactagctaacattattaagcgctatgtgccagcacggttttaagtcgtttgcatacacagtatcaactcatttaactgggtgcaacaactctgtggtaactaatattatcattctcattttataaatggggaaactgaggtatagaaagactatgtaacctgctcaaggtcatatggctaggaagaggtggagctgggacaccaacccagacagtcacaccccaaaaccactaaactacactcctcccatcagttttcctctctagaggctgaggtcttcagctcttcacctccagattttccaggcccaatccctcagaactggtctcctgttacttaccataagagcagctgttgaaggttacctaggagggaaagagtaaggaagaaaactaccccaatttcactttccttgccctgccacatcccagtcccagccctggccacactcacctccctggcactgcccattggtatcaggctctggctgccccaaaatggagaagacctcatcctgcagggagtgagtgacacggagcagcccctcctgaaaggcagcatagaggggggcccccactgtgcgtagcagaccgccccaaagagcctccttggagcctagctcccctgttggggtaagcaaacccaacagaccctgcaaaaagtgaggagctgcctccctcccatcgaggcctgtggcattggtggggtccacactgggctgcacctgcaccagagcttgccagcgtgtgccctctaacaacagcagcagagaaggcaaccagtcagcagccaggacacagtcagacggcccatcacgggtgcatgggggccgagttggggtaggggggcccccaggaactaaggctcccagcagcacctccacaagtccacccagcacccctgcctggtgcaccaggaaatctcggggagtctgctcctgtcccagcagtgccagcatatcccctagcagccctagcattggctcccagtcggggctacctctcagtgtcactagaaaatcatggagccgcagagcaggcggctggagaggtgggggctctcctactggtccttcccccattctcccaggctcaaaggaagaagaaatgttggccaggaatgtagagaaccgtgagcggctcagggagccctggggagcctggtccagagtggagagcaatgacttcaggaaggagagaccagggtccagggaatgaggcccagtaggggccagagtcactgtaaggagagaaaccagaggtcactgaaggagaggaacacagagcccaaactcaaccctgcccctgagcacagttccctacctggatctaaagatgaggtgaggggatggtgagctgaacccctttcactggcctacagtaagtcttggcctgcttttcttaaccctcatttttcccttttgcacaagtctctgcctctctcctttgtccttctatctaacaggttcacctccatattcttaaagtctttttccagccaccctcctcctcatccccagttctgctcactgttcttcttacctgcaaaggacagcagcagcagcagcagcagcagcagcagcaggggccagaggctgagagccatgtttccaagtgaacactggtaccggaggtgagttctggttattctcacctgtgtgggatagccaggtgagggcagggcactgcaggcaacctgaggctccactgacactgtagtgtggtctttcaggaaacaatatgtgtaacctgacagcaggtttgttacctgagccgctgaatatctgatcctttagctctggagaagggtatgcttctgtgagagggactaatgataggggatcccaggggcccctcagagaaacccaaggagattgcttgagttaggagccagtgatgcagaaaggaacaggcagacatggagatggagaactggagaccaggggtgtaatctggggttctgcagaagcaaagaaaacaaagaggatatgaaggagctaagaagcaagtaggatttgaggaaattgaagaagaaatgacgcccaggagaaacaaactgcacagcaaggtataaacagacgagaggtccagtccaaggatggagaattcaggaagaggagagctgctttcaactactacccagaaccacagagtgtcaagagctgagcagtaccccagagatcacatacaccaaactttttcacttatggataaggaaacagacccagagaaatgtgatttgctcattaggccattcaaatgtttgggtctttccttccccctccgggatcccctatcatttggttctttctctgtggcctaggtgaaagccctatcaaaaactctgagctgagaagacagaaaccagattaaatcactatgcacagggactgatctccctacacacagaactgctcatggaacagagaaagagatttcattcaaaataatctggtctggtcagggttagaagtcttttttcgtcatttttgttttttgttttattggttttttggttttggtttttttgagatggaatctctctctgttgcccaggctggagttcagtggggctatctgaccactgcaacccctgcctcctgggttcaagcgattttcctgcctcagcctcccaagtagctgggattacaggcacgtgccaccacacccagctaatttttgtatttttagtagagatggggtttcaccatgttggccaggcaggtcttgaactcctgacctcaagtgatctgcccacctcagcctcccaaagtgctggggttacaggtgtgagccaccgcggctttttttttttttttttgagatggagtctcactctgttacccaggctggagtgcagtggcactatcttggctcactgcaatttctgcctccttcattcaagcgattatcctgtctcagcctcccaagtagctgaggactacaggcatgcgccaccgcgcacggctaatttttgtattttttggtggagacggggtttcactatgttgcccaagctggtcttgaactcctgacctcaagtgatttatccacctgagtctcccaaagtgctgagattacaggcttgagctactgccccagtccaggattagaagtcttttccattctccatctatatctccccaaaggccttcactttataccaactctaaatagtaattcaacactgaagctatacccaaacttttattctgtccttctttccctagaacccttccccattctctccctcaaatccacacatggaacttcattattaatgtgcttctgatctagaagattcacttaggatcatagagttttatttttgtgtatttatttacttagagacagggtcttggtccatggcccaggctggaatactgtggtatgatcctagctcactgcaccctcaaactcctggactcaagcaatcctcctgcttcggcctcccaggatcacagaagagacctgaggaatcctctggtaagaacttctcattttatagacaggggaattgaagcccagagaaatggaatgacttaacccaggtcacaaagacagctgggagcaatgatgggattttccaaggcaaatcaaaagttgagatcagtgaaatgatctgttgtgtaattttaccaatattccctttgcccatcaaggataccacatctagtctaaaaagcagacagttgaatctgagggagaatacgacctgagttcccaacagctttgtggttccagcccatcctgtaatccttctgaatttctgcccttcattctgtaacaaccctcttataataaattatccttctttcctcatagggtagcaaaaaatgagatggtctaggttcaaaccctggttccaacatttactagctgtgtgtcctggggcagtttctaaatctctgtttttggttttttgggtttttgttgttgtggttgttgttgctgttgttgtttttactgtaaaaaggaaaaaaccctagtgtagagtttttgtgaggattaaattagataatgcatttaaagtacttagtgcaatgtctagcattcattcaacaaagattaagcacttattatgggccagacactggtacagaataaacattcactctatgttactattactattattagaatagctcaagatgaatttttctacttgaaattaaaggagttctaatgaatacataaatgattatctggaagttgtatcttgagtgaaagaccttcagaacaaatatggaactagttgagtcaaccagagagagaaacaatgaggattcccttaactcaggatggaaattttcctggcagtccacgttctgctgttgtaagccattgattaagcaattctcttgccgctaaggattcagactatgtgcaaactgacggcaaagtgcttagggtttatggcacatataccaggctatttgagtgtattggtaattgcttataatttgataaagttcaacaagagcaagacaagttccaacctacaggtgaccaaatggaaacagagaacaaccagcaaatttaaattacaaaggtccagaacaagaaattaatcatatgtcctgctaaaatgaaatggataagactggtgataactggaacactctgtgatctgccagttagaatgggtatacctgggaagagccacaggagttgagaactctgaaacatcctcactccccaaaactcccacaggacactctctgcctgacaagaacagatgcctccctttttttttttaattgaaactgagtctcacactgtcgcccaggctgcagtgcagtggtgtgatctcagctcactgcaacctccacctcctgggttcaagcaattctcatgcttcagcctcgtgaatagctgggattataggtgcgtgccaccaggcccagctgattttttgtattttttgtagagacagggttttgccatgttgcccaggctggtctcaaactcctgggctcaggcaatttgcctgcctcggcctcccaagtgctaggattacaggcgtgagccacaatgctcagccagatgcctccctttgtaaagtacaattatttttctctttttttggtttggctttggtaactgaaatatttattgcttactagatatctaggtgtttctcacatttcccagatctcttgcagttagctgggatcaggtgattagttctgttcaatggactgtggttgaccaaagaatttaagagctagcaaatgagcctccaacaatctcttccctgttgaggcaacctagaaaccacatgttgagatggcagtgtcacaaggtcaaaatagcccgaggctccaaattaccacagcatttacagtcagtctttgtcatttgtgagttctgtatttgtggatttgcctagtcactaaatgtttgtaacccaaaatcaatacttacagtgctattgaggtcattcacagacttgtattgagaggtgacaagttggagtcacctgatatacacgttcccagctgaggtggaacaaggcagtgctctgccttcttgttgcagctctcatggtgtaaatattagtgtcttttttttttttttttgagacggagtcttgctgtgtcaccagactggagtgcagtggcgatctcagctcactgcaacctccgaccccctggtttaagtgattctcctccctcagcctcctgagtagctgggattacaggcatgtgccaccacccccagctattttttgtatttttagtagagatggggttttaccatgttggccaggatggtctcgatctcctgacctcgtgatctgcccgtctcggcctcccaaagtgctgggattacagccgtgaccaccacacctggccagtaagtgtcttttttgtggtctatctagtgatgcactttttgcattttggggctatttgttggtgatttcactgtttaaaatggcccttaagcttaatgccaaagtgttgtgtggtgttcttaagagcaagaaggctgtaatgtgccttatagagaaaattatactggaaaagcttcattcactaccgggcgtagtggctcatgcctgtaatcccagcactttgggaggctgaggcgggtggatcacctgaggtcagaagttcgagaccagcctggccaacctggtgaaactctgtctctactaaaaacacaaaaattggctgggcgtggtagcgggcacctgtaatcccagctactcaggaggctgaagcaggagaatcacttgaacccaggaggcagatgttgcagtgagccgagattgcgccattgcactctagcctaggtgacagagcgagactctgtctcaaaaaaaaaaaaaaaagcttcattcaagcatgaggcacagtgctgttggccatgagttcaatgttaatcaatcaacaacatatattaagtaaggtgtctataaacagaaacacaaagaaaaccaaggttatgtatttgatcagttgatgaaaatgttgtcaccagaggctcacaggaacctaaccctgtatttcccctgggagcagtggttcagtagtcactaattcagttgtttgctgcacctttataaaacataatcatcataaataataaaaatttactgtagctgccttgaacagttacccaaccagtattgaaaccttcatgagtgagtaatatgtctttcttatactaaaccactgagatttaggggttaatttattcttgcagcagagcctttgactcttctgattaagacagttaaattatgtttgcactttgatatcagatctctgaattctaggtcttcattccatatttattagtctggtgaccccaagaagtttctataattcacttatctgtaaaatggagatactattactcacccacccaattttgctcattcacttgtattataaagtgtcttgatgtggcaggtactggaacagatccactaaatcttaccaccactatgattagactagctcaagatgaattcttcttctgcaacccaatctttttggccgggtgcagtggctcatgcctgtaatcccagcactttgggaggccgaggcgggcgggtcacgaggtcaggagatcgagaccatcctggctaacatggtgaaaccccatctctactaaaaatacaaaaaattagctggtcgcggtggtgagcacctgtagtcccagctacctgggaggctgaggcagaagaatggcatgaacctgggaggagaagcttgcagtgagctgagattgtgccactgcactccagcctgggagacagagcaagactccaactcggaaaaaaaaaaaaaaaaagaatcttttcttttttttagagatggagttttgctgttgatgcccaggctggagtgcaatggcacaatctcggctcactgcaacctccgcctcccaggttcaagcgattctcctgcctcagcctcagtagctgggattacaggtgcaagccaccatgcccagatgttttttgtatttttcagtagagacggggtttctccatgttggccagactgctctcaaactcctgacctcaggtgatctgcctgccttggcctcccaaagtcctgggattacaggcgtgagccactgcgccttgccaacttaaagaatcttaatacaaaaattggtacaagaaatagcatcttaagtgaaagaccttcaaacaaaatacagaaaaagttaagcagcaaggagatctttgaggactcccccagcccatagaaactgtttagcagttcttgagattagaataggaagaacaggtttgaagaagtggtaataagttcagttttggacgtattacaacacagcgagacccccatctctacaaaaaattaaaaaatttagccgggtgtggtggtatgcacctgtagtcccaactacttgagagcctgaggcaggagagacacttgagcctggaagatcaaagctgcagtgagctatgactgcaccactgcactccagcctgggtgaaagagcaagaccctgtctcagaaaccaaaccaaaccaaataaacaacaaccacaaaacaggggaggagataaaattactatcttcacggacgttttattatttgatcatatgaggaactagttaggagggacagggatttctgttttgttcattcactgatatatcccaagtgtctagaacaatgtttggaatgtacaaactcaacaaatttgttgaataaacttccattcctgtagaattaaagccagattgttttcactgaggaaagagttaaagaataaaatgcagaacgcacagaccacagatcagctataggaagtcaggagggggccagggaacagtagctcacgcctgtaatcccagcactttgggaggctaaggaggggcggattatttgaggccaggagttcaagaccagcctggccaacatggcaaaaactcgtctctactaaaaatacaaaaattagccaggcgtggtggcgtgactctagtcccagttacttgggaggctgaggcacgagaatcgcttaaacccaggaggcagaggttgcaatgagcatagattgtgccactgcactccagcttgggcgacagagtgatactccatctcgaaaatgtcagaacagactaatttgagtaataataagaaaactccagtttcctgcacagccagctctgtgtgggaaaaagaaagaaaaaaagagggggcaggggagagagggagagagagagagagagagaaaggaagggagctagggagggaaaaagggaagaaaagaaaacaaaagaaagtcagaagggcacatctgtgtagtgttggaggaaaaaaggggaaggagggaatattcatcaaatacctataaagcagtgcttttgaatctttttttttttttttgcaaactctgccacccagattcaagcgattctcctgtctcagcctcctgaggctgggattacaggcgtctgccactgcgcccagctaatttttgtagttttattagacagggtttcaccatctcttgaactcctgacctcatgattcacctgcctcagcctcccaaagtgctgggattacaggcgtgagccaccacacccggccacttctgaatcttttatgtgcagctacatcacctgattcaataggcctgggtgatgaggcctgagattctatatattttttttgagatggagtctcgctctgtcgcctaggctggagtgcggtggcacagtctcggctcactgcaaactccatctcctgggttcaagcgattctcctgcctcagcctcctgagtagctgggattacaggtgtgtgccaccacacccagctaaattttgtatttttagtagagatgggagttcaccatgttggtcaggctggtctcgaactcctgacctcgtgatccgcccacctcagcctcccaaagtgctggaattgcaggtgtgagccactgcgcctggcctctatacttatttttattttattattttttttgagatggagtctctctctgtcacccaggctggagtgcagtgacgcgatctcggctcactgaaagctccgcctcccaggttcaagccattctcctgcctcagcctctccgagtatctgggactacaggcacccgccaccaggcccggctaatttttttgtatttttagtagagacggggtttcaccgtggtctggatctcctgacctcgtgatccgcccgcctcggcctcccaaaagtgctgggattacaagcgtgagccacaatgcccggccttctctttctatcctttaaacgtttctgtttctcgggtttctgtctccagccttcttttcttctaataatttgtttggattattaggaggctggcgtgtggtagctcattcacagctcactgcagccttgactttccaggctcaagccatcctcccacctcagcctcctgagtagctgggaccacagacacatgccaccacacccagctaatgttccttttttattttttttggtagtgatggggtctcactatgttgcccaggctggtcttgaactcctgggctccagcaatcctcctgcctcagcctcctgaggagctggaatcacaggcatgaggccaccaatccagcctttaaaaaaaaaaattgttttgtagagacagatctcactatgttgcccagggtggtcttgaacacctggccttaagtgatcctcttgactcagccttccaaaatgttgggattacaggtgtgagcctctgcatctggccctaatagtattaaatgttatatttgaccattgttatctctaattctagttgattcctctgaaatttctagatataaaatcgtgtctaaatatcacatttttagttatttccaaatatttatgccacatttcttatgaggatttctaatcaatgttatatattgcagtttatttttaaaacatttttgttttcttcctcattttatgaggaatgactgaaatgattttcattgaaatgttaatattgattcttggttttagataatctttacttcattttaaaaattcagatataattcatatgaaattcaccattttgtgtgtgtgtgtgtgtgtgtgtgtgtgtgtgtgtgtgtgtgtgtgtgttttgagacagggtctcgctgttgtcacccaggctggagtagagtggcatgatcttggctcactgcaacctccacctcctaggcttagcctaccaggtagctgggactacaggtgttctccacacctggctaatttttgctttcttttttttttttttttgtagagatgggattttaccatgttgcccagactggtctcaaactcctgagctcaagtgatccacccacctcggcttcccaaagtgctgtgattacaggtgtgagccactgcacccagccaaattcacaattttaatgtgtacaattcagtgtttttattttattttatttatttaattttgagatggagtttcgctcttgttgcccaggctggagtgcaatggcgcagtcttggctcactgcaacctctacctcccgggttcaagcaattttcctgcctcagcctccaaagtagccgggattacaggcaaccccccacccaccacacccggctaattttgtatttttagtagagacagggtttcaccatgttggccaggctggtcttgaactcctgacctaaggtgatccgcccacctcggcctcccaaactgctgggattacaagcgtgagccactgcacatggcccaattcagtgtttttaaatatattatattgttgaactattcaagactatccaattccagaacatttccatcacctgccaaataaaccctatacctatcatctgtcagtctcaattcctccctccctaacccctgagaaaccactaatttactttctgtcttcatagatttgtttattctggacattcaattcatttgccttttccccatcttggcctttttgccagacatactcttaggtgaggactttataattaccaccctattgcccccttccatctcttccccacttgggtagcagcccttacgtaaggttgggtgttactgaccttacctccagttcaggagaaagccttaattagtgatttcatcacatccaccaccttacctcaacaatttgttcagacgtaagcatatgatctaacttcttggtgcaatcagagtggtggtcaggatatctttagaggagtggaggttgacttacctgcagttaatgcccaaattttaagtgtacattttgttgaatttttacatctgtatataccggtgtaaccaccatgcagatcaagatatggaacatatctatagcactccagatgcttcatgcttcctccccatcagtatcttcactccaagaataaccattattgtgacccaaagctcaaaaattttgttcattgactgagaaaggagtcaccggctctcttcccctgcatatggggaaataggtatgcaagcctaggcgcttcagaaaattgtctggctacccaagtgaagccagtctgagaataacaagaacacgtggaggagagcgcagacaggaaaattccagagaaacaaaaccacaaatctaacaacagtgaatttttacattaaatcaatcctgaagctatactacccttgaattttccagtctccagtaagctattttattgtttaaatggcttcaactgatttttttctcaactcagaatttttaacctgagttagaaccttagctctacctcttacttggtatgtgctcttgggcaagctacttaacttacttaatttctttaggccttagttttctgatctctaaaaatgtgacgctatcttccatatatgattattttatgaaatatgcatactctatatacagtatatatatactaaatatataaatatcctcatacatgttaaacactcaataagtgatataatttttaataataaacatgtctaaagacttaagtcttctaacgatggaatgggatcccttctagataataaatcccaaataactagaaacattaagcattacctggataatcctcctttcagtgatgttctaaaaggtgttcctgctttgatgggagatagattaactctgaaatcccttctaacactaaaaacctgtacaacacttactgatttgaacactgccctgagctatggcaaaatgaaataaagagactttcggtccagaaacaggtaaaaataatatccaattaaagttaatggttcacaagagaagcaacatgagtggaacacgcaatggaaacaatacttctcaattagttacactaacagctctgaagatctccttactccacagaggggcctttacctatgcatcagggagggagagggtaaaattaggactctaatcaggcagtagaggttgcaggaagggtggaagctataatgataaagtcaagaaatgagtcagattcaggagctgtggaaagggtagaaagctaaggagcacagactccactggcatctgagctaacttgttttgttcttttttagagatagggtctcgctatgttgcccaggctggaatgcagtgatatgatcctagcttgctgcagcctcgaactccctgcctcaaacaatcctgcctcagcccatagctgggactagaggcacacatcaccacactcagcttgaactaactcttttacttgaccttatgcctttcaatatcccttatctcagggtcacactactgagcagctatcaggagtatttataagacacttatacagagtctcaccctgttgcccaggctggagtgcagtggtgcaatcttggctcactgcaacctctgactcccaggttcaagtgattctcctgcctcaggctcccaagtagctatgattacaagcatctgccaccacacccagctaatttttttgtatttttagtagagacagggtttcaccacgcctggcctagacacttatactttttaattttaatgaacagacattgttctatctgaatgtttatattttcaattctctatttccaacaattcccttcattatcttttgctgggcccaaggatattgaagccatccattgctttacttgtcttccaagttcatcagtgcctgcactgcaaaggaaacagattgtgaggctggagagctaagaatattctacatatataaatgtttggtgaagaccttgcttttctgggttctaggttccctcacaagtctttactaatctttaaattaagccatatgattctgtgtactctttgccatagacaagttttattaggattaaagaaactaccttgctgcattttcctccttttcaccctgtcctccctagagaataagtgggaagtcagggctaagaatgactagaaggaacaggattaaatttaggcaacattgtgaagtaagcaaagcctgtctttcacatcttgccctaaattccatgttccaatattataaattcctcatttcccacctgtgcccaccacacacaaacacacagtcctcctctctaatttcttattttcaaactgagttgatttcaactaggtatgaggggaaaaacccagataacacatattaaatcattaaaatccacccctaaatcttctgtttttggtttgtcttgagacggagcctcattcttttgccaggctggagttcagtggcgtgatctccgctcactgcaacctccgccttccaggttcaagcaattctcatgcctcagcctcccgagtagctgggactacaggcatgtgccacaacgtccagctgattttttgtattttagtagagacagggtctcaccatgttggccaggatgatcctaatctcctgaccttgtgatctgcccgcctcggcctcccaaagtgctgggattacaggtgtgagccaccgtgcccggcctttttttttccttttagagggaaattgtattaagccaaattagtcatagagtaatgaaatttaggaaaaataactttgaatagatagttcccagtttacatcaaactctactatttaaatcacatatttatctttatagaggctgacactagaaggggcagatacaaacagaagtttagaattcataaacctctttaggcagttaggacagtgagcacgtgtgggcatcctgctcattgtctgatcccccatagctctccagcttgaggcttaggccctgctgctcaagtctgaaatgcaatcttcagagagaataaacgtgcagaaactggtgggctgcccaaatcaagcaagagcctaccttgtcctaattcccaacaactgggattagactttctcttcttgggaaataagctctcatacctcataggatttgggtgtcccctggtacagaagcagagtttctaggttctctctcagttagggaaaagtgggacacattcccagaatgtgacataccaaaccaagaattttagtttctgcctattttagttgtaggcagaaattgagaagctgagatgccagaatagtggacaccctcctccttctccacagctataaacgctatatatatattcccatggtccccatgactgccctaactccatacctgcaaactcttgtaacttcttacgttcctctaggttatactgaagcttttctagcaactcaaaatatcggaagagtgagtctctgggccaaacacggtcatcctgatccatttccattagcccgggcagattttcgtgcacaagagtctcccagtccaaacgacctgcagggaggaatgcttcagaaaagcacgtctagatttgtaaaagttgggtaagagctggtaaatcctat

SEQ ID NO: 264 - DNA, 503 bp, Homo sapiens
ttttaatttatggaactagtgggatacatttatctcgcccgcactaattaactatccttaaatcacaatcttcgaaaggagtatctgccacatgcagtctggtaaactgcttttcataccttactcagtcctaagtatgtcaccatggacataactggtgctgccaatgcaaagaccagcaagtgctttctgattcgattccgctctaagccagcatgcatcaagaaggaaaccagtccaaaagcagctggtgccttatgtagcatgattgccacaaacacaattaactggacactggtctgtgaagtagatgctgctgctcccaaagcaacaccatcagctgcagcatggacaaccagacccagcgtggtggtgattttggaatagctagaccttgctgcttctggatcgtcagtagaatgcacatgggagataccaatctggttcaccagcaacatgaaaacgaagcccagaacgagggaaacaccaaaataggcatgcag

SEQ ID NO: 265 - DNA, 3190 bp, Homo sapiens
agcggagtggaactgacccaggccagtggagccagggcctccgggtgtgccggacccgaagcaggggccatgctgtctggtgaacggaaggagggcggaagcccccgcttcgggaagcttcatctccccgtgggcctgtggatcaattcccccaggaagcagctggcgaagctggggcggcgctggcccagcgcagcctctgtcaagtcttcttcgtcggacacggggagccgcagcagcgagccgctacctccgcccccgccgcacgtggagctgcggcgagtgggcgctgtcaaggcggccgggggagcctccggtagccgcgccaagcgcatctcccagctcttccggggctcggggaccgggaccacggggtccagcggcgcaggaggccctgggaccccggggggcgcgcagcgctgggccagcgagaagaagctgccggagctggcggcgggcgtggcccccgagcccccgctggctacccgcgccacggcgcctccgggggtcctcaagatcttcggcgccggactggcatcgggcgccaactacaagagcgtgctggccacggcgcgctccacggcgcgcgagctcgtggccgaggcgctagagcgctacggcctagcaggcagccccggcggtggccccggcgagagcagctgcgtggacgccttcgctttgtgcgacgctctgggccggcccgcggcggcgggcgtgggaagcggcgagtggcgggcggagcacctgcgcgtgctgggcgactccgagcgcccgctgctggtgcaggagctgtggcgggcgcggcccggctgggcgcggcgcttcgagttgcgcggccgcgaggaggcgcggcgcctggagcaggaggccttcggggccgcggacagcgaaggcaccggcgccccttcgtggcggccacagaagaaccgctcccgggcggcgtcgggtggggcagcgctggccagtcctggcccggggaccggatcaggggccccagctgggtctggaggcaaggagcgctcagaaaacttgtctttgcggcgcagcgtgtcggagcttagccttcaggggcggcggcggcggcagcaggagcggagacagcaggcacttagcatggccccaggggcagccgacgcccaaatcggaactgcagaccccggggacttcgatcagttgactcagtgcctcatccaggcccccagcaaccgcccctacttcctgctgctccagggctaccaggacgcccaggactttgtggtgtatgtgatgacgcgagagcagcacgtgtttgggcgaggtgggaactcgtctggccgcggggggtccccggctccctatgtggacaccttcctcaacgccccggacatcctgccgcgtcactgcacagtgcgcgcgggccctgagcacccggccatggtgcgcccgtcccggggcgccccagtcacgcacaacgggtgcctcctgctgcgggaggctgagctgcacccgggcgacctcctggggctgggcgagcacttcctgttcatgtacaaggacccccgcactgggggctcggggcctgcgaggccgccgtggctgcccgcgcgccccggggccacgccgccaggccctggctgggccttctcctgtcgcctgtgcggccgcggcctgcaggagcgcggcgaggcactggccgcctacctggacggccgtgagccagtcctgcgcttccggccgcgcgaggaggaggcgctgctgggcgagatcgtgcgcgccgcagccgccggctcgggagacctgccgcccctcgggcccgccacgctgctggcgctgtgcgtgcagcattccgcccgtgagctggagctgggccacctgccacgactgctgggccgcctggcccggctcatcaaggaggccgtctgggaaaagattaaggaaattggagaccgtcagccagaaaaccaccctgagggggtccccgaggtgcccctgactcctgaagctgtgtctgtggagctgcggccactcatgctgtggatggccaacaccacggagctgcttagctttgtgcaggagaaggtgctggaaatggagaaggaggctgaccaagaggacccacagctctgcaatgacttggaattatgtgatgaggccatggccctcctggatgaggtcatcatgtgtaccttccagcagtctgtctactacctcaccaagactctctattcaacgctgcctgctctcctggatagtaaccctttcacagctggtgcagagctgccggggcctggcgcggagctgggggcaatgcctccaggattgagacctaccctgggcgtgttccaggcagccttggagctgaccagccagtgcgagctgcaccctgacctcgtgtctcagacttttggctacttgttcttcttctccaacgcatcccttctcaactcgctgatggaacgaggtcaaggccggcctttctatcaatggtcccgagctgttcaaatccgaaccaacctggacctcgtcttggactggctacagggagctgggctgggcgacattgccactgagttcttccggaaactctccatggctgtgaacctgctctgtgtgccccgcacttccctgctcaaggcttcatggagcagcctaagaaccgaccaccccaccttgacccccgcccagctgcaccatctgctcagccactatcagctgggccctggccgcgggccgccagccgcgtgggaccctccccctgcagagcgggaggctgtggacacaggggacatcttcgaaagcttctcctcgcacccgcccctcatcctccccctggggagctcgcgcctgcgcctcactggtccagtgacggacgatgccttgcaccgtgaactccgtaggctccgccgcctcctctgggatcttgagcagcaggagctgccagccaattatcgccatgggcctcccgtggccacgtctccttgagaaccaataccaaacgagcgcgcgaaccttgaaatgtcacgggcttctacggacaggagcccgcctgagcgcaaagctttctgggagttgtagttcttatcccgcgtggaatgttgggagattgagttttcgggaagtagcggatgggacggtgggagcatgggcttaggatgtgaatgccagggagcaataaaggtatccgtggtatcggcgaaaaaaaaaaaaaaaa

SEQ ID NO: 266 - DNA, 3196 bp, Homo sapiens
agcggggggggaggaggaggagggactgagcggcggcggcccccgcgtcccgtgcctctatgggggaagcagacaatggattatgatttcaaggcgaagctggcggcggagcgggagcgggtggaggatttgtttgagtacgaagggtgcaaagtgggacgcggcacctacggtcacgtctacaaggcgaggcggaaagatggaaaagatgaaaaggaatatgcattgaagcaaattgaaggcacaggaatatccatgtcggcttgtagagagattgcacttttgcgagaattgaagcaccctaatgtgattgcattgcagaaggtgttcctttctcacagtgacaggaaggtatggctgctgtttgattatgcagagcatgacttgtggcatattattaagtttcaccgtgcatcaaaagcaaataaaaagcccatgcagttgccaagatctatggttaaatccttactttaccagattcttgatggtatccattacctccatgcaaattgggtgcttcacagagacttgaaaccagcaaatatcctagtaatgggagaaggtcctgagagggggagagtcaaaatagctgacatgggttttgccagattattcaattctcctctaaagccactagcagatttggatccagtagttgtgacattttggtatcgggctccagaacttttgcttggtgcaaggcattatacaaaggccattgatatatgggcaataggttgtatatttgctgaattgttgacttcggaacctatttttcactgtcgtcaggaagatataaaaacaagcaatccctttcatcatgatcaactggatcggatatttagtgtcatggggtttcctgcagataaagactgggaagatattagaaagatgccagaatatcccacacttcaaaaagactttagaagaacaacgtatgccaacagtagcctcataaagtacatggagaaacacaaggtcaagcctgacagcaaagtgttcctcttgcttcagaaactcctgaccatggatccaaccaagagaattacctcggagcaagctctgcaggatccctattttcaggaggaccctttgccaacattagatgtatttgccggctgccagattccataccccaaacgagaattccttaatgaagatgatcctgaagaaaaaggtgacaagaatcagcaacagcagcagaaccagcatcagcagcccacagcccctccacagcaggcagcagcccctccacaggcgcccccaccacagcagaacagcacccagaccaacgggaccgcaggtggggctggggccggggtcgggggcaccggagcagggttgcagcacagccaggactccagcctgaaccaggtgcctccaaacaagaagccacggctagggccttcaggcgcaaactcaggtggacctgtgatgccctcggattatcagcactccagttctcgcctgaattaccaaagcagcgttcagggatcctctcagtcccagagcacacttggctactcttcctcgtctcagcagagctcacagtaccacccatctcaccaggcccaccggtactgaccagctcccgttgggccaggccagcccagcccagagcacaggctccagcaatatgtctgcattgaaaagaaccaaaaaatgcaaactatgatgccatttaaaactcatacacatgggaggaaaaccttatatactgagcattgtgcaggactgatagctcttctttattgacttaaagaagattcttgtgaagtttccccagcaccccttccctgcatgtgttccattgtgacttctctgataaagcgtctgatctaatcccagcacttctgtaaccttcagcatttctttgaaggatttcctggtgcacctttctcatgctgtagcaatcactatggtttatcttttcaaagctcttttaataggattttaatgttttagaaacaggattccagtggtgtatagttttatacttcatgaactgatttagcaacacaggtaaaaatgcaccttttaaagcactacgttttcacagacaataactgttctgctcatggaagtcttaaacagaaactgttactgtcccaaagtactttactattacgttcgtatttatctagtttcagggaaggtctaataaaaagacaagcggtgggacagagggaacctacaaccaaaaactgcctagatctttgcagttatgtgctttatgccacgaagaactgaagtatgtggtaatttttatagaatcattcatatggaactgagttcccagcatcatcttattctgaatagcattcagtaattaagaattacaattttaaccttcatgtagctaagtctaccttaaaaagggtttcaagagctttgtacagtctcgatggcccacaccaaaacgctgaagagagtaacaactgcactaggatttctgtaaggagtaattttgatcaaaagacgtgttacttccctttgaaggaaaagtttttagtgtgtattgtacataaagtcggcttctctaaagaaccattggtttcttcacatctgggtctgcgtgagtaactttcttgcataatcaaggttactcaagtagaagcctgaaaattaatctgcttttaaaataaagagcagtgttctccattcgtatttgtattagatatagagtgactatttttaaagcaggttaaaaatttaggttttattcatgtttaaagtatgtattatgtatgcataattttgctgttgttactgaaacttaattctatcaagaatctttttcattgcactgaatgatttcttttgcccctaggagaaaacttaataattgtgcctaaaaactatgggcggatagtataagactatactagacaaagtgaatatttgcatttccattatctatgaattagtggctgagttctttcttagctgctttaaggagcccctcactccccagagtcaaaaggaaatgtaaaaacttagagctcccattgtaatgtaaggggcaagaaatttgtgttcttctgaatgctactagcagcaccagccttgttttaaatgttttcttgagctagaagaaatagctgattattgtatatgcaaattacatgcatttttaaaaactaaaaaaaaaaaaaaaaaaaaaaaaaaaaaaaaaaaaagaaaaaaaaaaaaaaaa

SEQ ID NO: 267 - DNA, 2508 bp, Homo sapiens
gcaaggacccggacgcgaccaggggaggcagaaggactctgcacttgtccaagagaagaatccagagaaatcagagcaggtcaaatagttctaaaagccatggcccagggactggtgacattcagggacgtggccatagagttctctctggaagaatggaagtgcctggaacctgctcagagggacttgtacagggaggtgactctggagaactttggtcacttggcctcactaggactctccatttctaagcctgatgtcgtctccttattggagcaagggaaagagccctggatgattgcaaatgatgtgacaggaccatggtgcccagacttggagtccaggtgtgagaaatttctacaaaaagacatttttgaaatcggggcattcaactgggagataatggaaagccttaaatgcagtgacctggagggctccgattttagagctgactgggaatgcgaaggccagtttgagagacaagtcaatgaagagtgctattttaagcaagtgaacgtcacctatggacatatgcccgtgttccagcatcacacgtctcacactgtacgtcagagcagggagactggtgagaaactgatggaatgtcatgaatgtgggaaagcatttagccgtggctcacaccttattcaacatcagaaaactcacactggtgaaaaaccctttggatgtaaggaatgtgggaaggccttcagccgtgcctcacaccttgttcagcatcagagaattcacacgggtgagaaaccttatgactgtaaggactgtgggaaggcctttggtcgtacatcagaacttattctacatcagagacttcatactggtgtcaaaccttatgaatgtaaagaatgtgggaagacctttaggcagcattcacagctgattctgcatcaaagaactcacacaggcgagaaaccctacgtatgtaaagactgtggcaaggctttcattcgtggctcccaactcactgtgcatcggagaatccacacaggggccagaccctatgagtgtaaagaatgcgggaaagcctttagacagcactcacagctgactgtacaccagcgaatccacactggtgagaaaccctacgagtgtaaggaatgcggaaagggctttattcacagctcagaagttactcgacatcaaagaattcattctggggagaaaccctatgagtgtaaggaatgtgggaaggccttcagacagcacgcacagctcacacgacatcagagagtccatactggcgacagaccctatgaatgtaaggactgcgggaaggcatttagtcgtagctcatacctcattcaacatcaaagaattcatacaggtgacaaaccctacgaatgtaaggaatgtgggaaggcctttattcgtgtttcacaactgactcatcatcagcgaattcacacttgtgagaaaccctatgaatgcagggagtgtggaatggcctttattcgtagttcacaacttaccgaacatcagagaattcatcctggtatcaaaccttacgaatgtagagagtgtgggcaggcatttattcttggctcacaactcattgaacactacagaattcatactggttagaaagccttgagtgtaagggataaagataagcctttatgtggagttcacatctggctcagtactaggtaatttttaatgtagtgtaattaatgtcagaaaacacctgtcacttccatcatagaacatcagaaaactcacacccaaagaaaattaaataaatgtgggaattctttttgcctcactcactgtttcctaagcatcagataatctatgctaaaaaaaaaatgaatatagaaaagctgcttcttgccattcaaaatatgttaaatttctgacaattcctaatacaaaaatgacccgattaaaagattctgtggccaccgtgcctggactttccattattttttgttctttcaaacaatcccataatatttcccttgcacgtaaattattttgtacatgtgtaatatatctttaaggtaaattcctagaagtggaaatgctagataaaaatgtaaatttttggctgggcgcagcggctcacacctgtaatccctaatcccagcactttgggaggctgaggcagggggatcacgaggtcaggagataaagaccatcctggccaacatggtgaaacctcatctctactaaaaatacaaaaaattagcaacagagcgagattccgtctcaaaaaaaaagtaactttttaaaactttctatcatgaaaaaatttgaacatatacaaaaatacacagaatcttatattgaactccagcggcctcatcaccagcttcaagaattatcagctcatggccaatcttgctttgtctgtgtacccacttctctcatctctgttatttttgaagtaaataccagatatattatttcatccacagacatttcatacatatctttaaagcacatgacaacattagaaaatattttcactccttaaaaaaaaaaaaaaaa

SEQ ID NO: 268 - DNA, 31737 bp, Homo sapiens
  misc_feature (8289)..(8289): n is a, c, g or t.
  misc_feature (13342)..(13342): n is a, c, g or t.
  misc_feature (13453)..(13453): n is a, c, g or t.
  misc_feature (18251)..(18251): n is a, c, g or t.
  misc_feature (18343)..(18343): n is a, c, g or t.
  misc_feature (18682)..(18682): n is a, c, g or t.
  misc_feature (18684)..(18684): n is a, c, g or t.
  misc_feature (18686)..(18692): n is a, c, g or t.
atttctgtgacctttttgtatatgtgtggaggcggtggagtcttttctgttaattgtgttaaacttgttagtggagttctgcgactcctccacctcctgacttaccttgctgtttgtttgtttgtttgtttgtttgttagtttcacccactgtggtttgtcagtttctgagagacaggcactaggatggccaataatattgtggatttcttgatgtgttggttttgttcatttgtttttcctgccccatcctctgggcccttaaagcctgggcacatgtgtcctctccttacgtctggggaaatggtctccattgagggtttgagtctgcgtggcttccgcctcccttccctcctgctagagcccctctggaagctgctggaagccatgtcctccacatcccctggctcttccttcatcccatactttcttctccctgacagagctgtcaaggggagtgcctacaccccacctccattgctgctcaccctcccctggcccgtgctgggcctcggccatctctggggctgtttctaggcccatctaagcgaggggttccttaacctgccttgcttttgcagctgcctgaacctccctctaaggacatcagcactcttcggaggccaggtccggcctgctctgctgccttggtgggaagctttcgtccctgcagggtggggtgggtctgtcaagtgttcggtggcccctggctggtgctgtagcaacacgggtgtcagagggcggacaccgaagcctggtgctctgtgcgagtcccgtttcctcgcctctcagctgtgtgactccaggtgcagaggccccgcgtggggcaggagcactgcaagcgagaggatgggaaggtggccgtgggcctggcaagggttggggaatgtggtgagaatggtgcccatggggtcacgccagccacacacactttctcgagaagtttcaagtggagccacagggccattgtgtgtcctgaatcattgctctggctgagggagtctggggacccatgagggccagatggatgggctcagatggagtgggaggccattgggaagtggctggtaaaaagcctcatgagggcagagccccactgaccccacacagttacccatggtgtccctttccccacgtggtaattctggactgttcacagtggcttccaaggcctttgggatgggccttgctttctacccttctgctggaaaccctcccagccatttgaggtcctgccctctgctcaccttgttccctgtgcccatgacatctccccaccttttcctggctgctatgtactggtcctataggggttccttaaagggtgcatcttccaagccactcctgttgccctcctctgcatccacatccctgctctgcacacccccaccccagcaagtgtgtgtgagctctgtagtcgtgtcatggccccagtgatgtcctcattctatccctgtcccttcatggcagagtggactttgcagggtgactaagtgaaggatccagagatggggagatgatcctgggttatccaggggccccgaatgtgatcacaagggtccttctaagagggaggcaggagggtcagtcagcggagaagacagggggatggaagcagagctcagagaggctgaaggtgctgtgctgctggctttgaagacggaggaggggccacagcccaggaacgcaggcagcttctagaaaaccggagaaggtgaggaatgaatcagccctagagcctccagcaggtatcagccctgctgacaccttgttagcccggtgagactcctgacctccagtgctgcaagatgtcacacacgtgttgcgctatgcttgtggtaacatggcaccacagtgcaggatgctgacacaagcaccagcacagcgccaggccctggggtatagtgtggataagatggactggaccctaccctcctagggatgtccctctaggaggtggaggtggggaaatggggacagatattaggccattatggcagaatgcaagtgtttagttagaactgtgctaagtgcgtaaagagagctaaaggctacataataagttgtgagcctacctagggtattagcagaggtgtcccaaggaagctccctgtgagccaaaccccaaaggatgggtggaaattagctcaactaagtggagaggtgggatagtcatgggccaacgccccaaggcaggaaagaataggcctggtctgtgggtctgagaggatggagagggctgaacacgggccaaaggagaaagttagggagggaaggtggagtccctggcaggggctcagctcagaacagggggagccccaaaggatgtgaggcaagggagcaatgaacaaatctcaccattgtgagatctgaaattcagaacggtggcataggccagagtaggacattgtgaaaaagaaacaattagagaagcagaaagagtgcttggaaatgtcaattatgctgctgaattaaaaaaaaaaaaatcagtaaaagatggaagtaaatctccctgaaagtggaatgaagactgaaagacagaaaatcagaacacccaagaaacatgcagactcaatccaaggacatccaatatcctgctattggaagttccagaaagggagatgagaggaaatagagactaaagaaagggcccactgagaacctctagcagaaaagagcagccactgtgtcatcatgcccttcaggaacagcagagataaagacaacattctagaatcttctcaaagaagtaacaggcgattttccaaacatgggcctctgaacagatcagtctttggtagagaaaatttatgaagagagatgccttcaaaattgtgaaggaaaataaaattctatacctagccaaagtatctatcaagggtgaggatacagtaaagacattttcagatactcaagaacttataaaatttttccaagtcactgcaggaaaaaagtatagaatttgctttctatcccttttcttagaaggttctggagaatgcactccagcaaaacgtgggaggaaaccagggaaaaggaaggcaccaacaacaaggaggcagaagaccctacacagacagaacagggaggtccaagcccagcagctggctcagggctacaggcctccagcccaggcagcccaggcaggagcagaggacaggatactcctgaagaggccacccaggaagagaaaataggtgggactgggaagaaaatctgcaacggagcttccaaaacagcggaggatctccctgagggaggtgttgttagagaagagagcagagaagcaggagaacccagaaaggaaatgtgagcacagtataccccctggctctgtgggggacccaggcagtgggcatagatttcatcaaaacaatggggaagctgtgctggacagttagagggtggacaaagccgagggtggggtgagagcttaagcctcaccttcatacaaggaagattctagtagctaagattgacaagtcgagaaaccatgtggccagcatgtcaccaaaagctgataagaggaccagtgatgggcttcccgagagtggagatgggcatgcacaataaggcctggaggctgatgattatcgataatatagcaggcgtgccctttccacagcacaaacaccttgacacacaccgtcacacacacccatattcgacacacacattcacacaaacacacccagacacatgcatgcacatggataactaactcttccagcaagagccaccccctggctgaagtgtgaggctgtccatggaggggccagagtagaggggaggtgggtgaggaggatacgcagaggccctgggaggagggaggctaggcccaggggtggaaagaagacagatacgagagggatttggagacacaatccccagacttggggacgagctggatatggtggcgatggaggtgagtcttcaggacagaccccctggttctggcttggccatatgttggaggctgaaacgattcatccagacaggagcagggaggaggacatgcagggcctgaaagtttctgaggtgtccacgtggaggtgtttgcttggcagtttaggctgcaaggctcagcagggagattggagctgaaaacagaggctgcaacatggaggtggtacctgaagaaggggtgtggatgaggttgcctggcaagagattgcagggagaggagagagtgagaatggggccactcaaggggtgaacagggccttgcagtacaggaagcagctgggggtggcgggaagaagacagtcaggagcttgggcatcctagaggcccccgggacagctttgaggaaggaacgtccccacaccacagagccatagaattctgtacttggcctgtctcagtgccgtgccgcatccatcctgcccctggcaccggagggtacactgatcagggacacgagttcccctgccgggcacagagcaggttcccagtgagttctggggcctcagtgactgggcaaggacaggggcgtttggacaggggaggccgggtgtggatggaagctgtacgatggggcctgggccagggattgtgggccagctccgagctcagacattggtctgcacatgtggctggtgcaggaggcgcagtgtgctgggcctcagcctggacacggctgtcccatgcgcagagacagggtcacggtggaaagagagtccagagaacatgggaggtgccgtttccctgcggcgggactggggctggggcccgacttccccgaccctgctgtcgggcgtgtgccttcatagcccaggaagccagttcctggcagggtgggctctgcagccaggccgccagggtgcagacccagaccaatgggaggccaagggaggcccgcagcccagaccttccgagccctcagcctgctcagctcagtgtccttccagggaaatgggcgtttcctgtgggaaggtgccaggggccccgggtgctggaagagcaagcaccacgcgggggggtaggggcgccccagccctctactggccagtgtccctccagtcgtccagcccttgctgccaggggccccgcccatgtgcctggaatcacaccctggacgcttccttctttgggttagatgtcgtcgtcttcaacaaatattttctgaatgtctgctatgtactagactctgggaacacaggggaaagtatgtggacctgcccatgaggaagtcagtacagtggggccatgaacaataaacagacaattaattatccttcgcggagctgcgcgggggcagctctcccaaagcagtcagtcattcacacttcagtatgaatgagtctccgggtactttgctcagtaacggactggaccagcgcggcctccacgccagggactggggcaagggtggagtttggagtaaagagagaggcaaggcaacccctttccacagacactttaccacctccccacattgacaagctggctccccagggccacccggagccccttcctcagatcctgtccccattggcatggtctcagcccctcctgccccagtaccctctccccgaggcctcgtcctccccgccatcctggaaacgattttgttgtctgcagagattatgtgtaactgcctgtgagttataagcctccacagcaagcagcctgttacctaaccaggcctggctcatgccaatgtcttgagtaattattggggggcgggggctgtccagcccgcagcagaacctctccgagggagtgctattgtttttcatgtcagctgcattttaaggctacatttcacgtcagctgtgacttggaaggaaagagggcccggcctttgaaaaatgaagaaattgagccggggttgggggcggggagggcaagttaacccttcgggctccagtattccccagcttcccagggtctcctggcagtaaccaggccagctgggggtcagaacccgcggccaggcccagcagccgcctcttggcagcgctgatggaaaccgccgtgcggttccgcgcagacagtcacggaaactcaggcagacccggcgttgggtgcgccaggccggtgtgggagcactttcccccgccccctcctgctgctgcttccccgaaggcctccccagcagacctgcagctgggcacccacagggtagaaatgccctggattggctgtggcacaagagggatggcccagcacacccagcccaccactgtgctcccagagggagaacagagaggggtgcagagggccagagaggcacggggctcccctgggcacccctcgtcttggggcccctgccctgcctccactcagaatcccactatgtgcttggagccatgctgggtgctggggagacacactaaccacttccccatatgctcacagccagagagacacacaggccagcagcctgtaaaccactgggtgtggggtgtctggtcctggagtgacaaggacagggaggaagaaagccaggcaggtggcccatgagccgtggagtaggtggggaaggggacatctccaaggaggtgacatcggagcagtcctctaaggagtttggagtcattttcagtcactcacaagccacaggagggcttcagcctgaagctcagaggtgatgtgcttagatgtcacagagccgggaggggaacaggctgggctgcagagaggaggccaggcacagtcacctcgtgttgctgtcccccaggtaggagataagggaccagagtcagggcaggtgggagaaggggaggttcttggttcagctgctgctgagacagtgaccctggggacagcccaaataagagagaactttgccacccgcagggtcccagagtagcagaagcttcagggctgatgtgtgcctggtgaatcagcctggccccagacctcctctctctgcttgctttcctgtccacaatccagtgcttctgtcctatggtccccagcggctgctcctgcattcaccatcacatctgcattccagcagcaggagggaggtaaaagacatgaaggacaggccccactcctgtaaaaccctacacagaagcggcccacgtcatccccctttctgtccacccgccggaatgtgacgcacgcctgagtcgctgcaagggcccctggggacggagtctctattccaggcaggcaaacactcagcttaattcagggttctgttgattaaaaaaaaaaagtggggtcgggggggcgggggagagcggctatggagacaagtggctgttttgccagagggaaaattccacatgtggcttggaggccagaccagaaggactcagataggagttgggcgcttgagggaggaaatgggggtacacttcagcggctcaggccagggtgtaagtagcaggtatgtggtggtactgttttccggaatgaagaggaaggggcgggcagaaggcagcgagagctttgtttggggtgtgtcgaattcaagatgcctctgagacatggaagtggtgaggtcaggggccgggaaccctatggtggtgttggccctgagtccaagccaggcaccaccgggcacatagaggtcttgaaagctcgaatgtggggaggccagcaacagagggaacactacctgcaaaggggcgagggcaggacaaaggctggcagcaccacacaggagccagcagggaaggggccacagccgggactcagaggaggcagccacgtgcagaaaggcacccatgggaacatggctcctgggagctggaggacttcagcaggcatggactagcacccaagaagacaactctgagaagtcaggacaggagatggtgtcgtcagggggctgctggaaggtttggtgaccggagcagcaggtgccagagctgaaagcactggttaaacgtgatgggtaaacacatgtctatttcagcttctttgaatcccactaaggtgacagtaaaggcatgaaaaacatggaaacatgtaaatcaactagggtaaagtggtcaggagaaaagaggagaccaaaaatatgttgacaaaggtttggaagctgggaagcaggaggacagatggagactggcctaggagactggagagggtagacaccaagccctgcaggaagaagagccaccaagaatgaggcagttcccaacccaggaccctgacaggcaggtctcaccccagcccatgaagccagatgctactgattctcaagctcagctagagacaggttgagtctccagaaaagctgagcctgagaggttctgaacttggagccaccaggagcagttgtaggtggggcaggagctcttgtgatgaaaacaacagggattcagtaaangcattccatctaaaaaggaagaactcctcccccacttccctcatcaactcccagaatgcccggtggggcacaccattgttttcagaacaccagcaataaagcagacactccacatttccagagagaaaaagtaagtcacacacaagagaatagaaaatcaaaacggtatccaatttcttaacagcaattcagaaagctagcacatagtagagaaatgccttcaaacatctgagggaaaaaatgatttcccatccagaattctatacctagtcaaactctcaggtatgagaatagaataaagacatttccaaacatgcacagtcaaaaattgtatctaccacatgccttttctcagaaagttacttgaggacgtgctctagcaaaatgagaggaaaaaacaaagaaagagaaacacaattcaagaaccagggagactccaacaccaaaaacaaaaggccaagagaattttcaacatgagtgaaagaagttctagcattacagctgctcagcatgcctacagtgcaaacagtcctgctaagactccaggaagaaatcccagaagaaaaaaaaaatgaaggtgatagactgccagtattctcaataggatgaaagaagttttacaattcttacagaaagttcaagaatgaattagtgacagatgcagtaaaaaacaagcaaaacctaaggccatttgtaacccaagggaaaacaagaagatgtaatcataacagaccacaggacacagctaaaaacagtgattacatagtgacataaagagttatatactgtttgtgtaaaacgcaaacagtaagtacttatttagcctagaattctaatttaactgtattggaaagataagggagtggggagggcaggggcatgagaacaaaatcttgatcacttctcttccatgttaggcagtcactagataatgtctaaagtgacaaaatttcaaggaacagcaatgtaaatgtgtagtttggaaataccaaggtaaagccaagagatagtcggtagggttgaagggctgcctctgggaacagaaattagagatagaagatctagcgcccagggaaggctgtttaaagatgggagagcttcacgggttttctcactaagggtaagaaaatctaagaaggaagtgatggtgccagagaatagggaattctgccaataccctggtggggagggggagggggaaggggaagaggatgagaaggaaggaggagggaagaggaaggaagagggaggaggaaggaggaggaaagaggaggaaggaggagggaggaagaaggaagagagttgagggaggaagagagagaaggtagagattggccaaaggagctctgagaggggaaggtgggtgcatgccaccctggctgggaacagcaggtgtgtggtgaaggggaaagaccagcaggccctttacaccgtgggcacaggctcaggactggctgcggtgctacgcaggagcctctgactagctggggctggggctttgcaggataaggccagtgagagaagaggattcactggtgggtgcctcctccccacctttagcaagggttgacagagggatctgggctcttccctgggcaggcatcccagagctatgacctgaatgatatcttagatgatctccaaggccccgggatctaagtccctgttaagtcccctgttaaaggacctaggtcctcccaatggcctgcaaaccacacccagtctagtcagcatgtatccccacaccccagtcccagtgtcccaagaacctcttcctccagccccgggagcaggaagggcgggctgggagctgcaggatggggcctgaatctctcatcaactcacagggtcagcctgggccaggcaggctgggggccagcccaggacctccttcctgggtggagaccttcccacccttccactcaccttccgagcattgtgggccttcccaggaacccccacatctccgtggccctcagacctctgacctcccaagggcaccccacgtgtgtgccctccagcaccctggccacagagccacacacctgggccttcccctctccccatcatcaggtaacccagcacaggctggcccaacccctctctaggcctcagctttcctgtcaggaaaatgcagggttaggagctgaccagggagtctttgaaaccgcaagggtacccttgggagaccccgtgcaggtcttgtcaaggcaggacagggaagtggtgatgatgagaggcagctggtctgggtgctcagccccaccccagcacccgcccaatgggccccctgagggaagctgcccatgctctctgcgccccattttctggcctctggcatgcagatggcagccctgcctgcttcccagtatggctgtgaagccaaaggcggcgatcaatgggatgttctcagaatgacaggtgctctgtgatcagcagcagctgctacagggatggccatcgggtgcagggcaggatgtccctgaggaggcacctcagcagacgtgatgggtgcctgtgcccacagttgggccatgagaagaagtacgtggcccggcctgccctacaccatcagggggtgcttggaccagtggcggctggaaataacccatgaacaggggagagaaggggtgaatgccttgtaggcctggaacactgtggggctgtcgaaggtgcttctgcctccaggaagccctccctgactgtggagacacaagaagctctccaggtctctgggtccctctggtactctgtgccctgaaccaccacccttaggcccagatctattcctgatccttctctagacttcagtcagtttcctcttgatgtcctggatggccacaaccatagtgtcccctccgctcctctctcccccacttccttccacattgcccctcctcccctctccccttccccaccactgctcccctccttcctccagcacccttctccccgctgccctcccctcccctccccgctgccctcctctgcctctctccgttgccccctcctccctcccccaccagagccctggaaggctaggtacagcgaggaagtggccactccatgacccccagtgatttcacttctctgagcctcaagagtctcacctgtccagggtccatgggatatgcctgactcagcccctggcacatggtcttgcagtggcctgagctggacatgcccctggtaggaagctggaaaggaggccctgcccgtgtaccaggagcctctgctccaggggggtggcctgaggcccaggcagacctccacctccaggcagccctgcaggtggacagctgggcctcaggcttaggacctgggacaactgcctagactacccccagccttcctgacaggtgatagcttcattgtccccaggacacacaccagcccggtccccaccctaccctttcccaccacccctgagggaaggcctggcccctcacgcacaattggggttgcccggcatcttggcagatgggcagcgttagagaagccttggacctgggcccttgcaaacggaggtaccagagggctgaactagatgagggacttgaaggctcagatgcctgtgcgggacctggcagggtgggggcttccgggctgggagactaggacagggtgcctgtgtcccctcctgggagtggggccgtcagagctccgaccgcacagggtcatggggagcaagaggaaccaggatacccacaagctgctcgctcagacgggctctgcgactccacaactcaccttcccctactgcaagatcagggagatgggacgcagtccccgcccatgcccagggccttggcagggtcaggagagccagtgcaggcaaagcaccaagcaccctgctgcctgggagaccacagttgcagcaggaagccctcctcaggtctgcccgcctccccggagcatgttccctctgtagctcccggtagggcctgtgtggagaaggttgctgatggcatcactgagcggcccagctgtggggtgaaaggcaaggctggggctgatgctccccaaggcaggaggagaccatggtctggctggggctgccccaggtgacaactgtagggtgtggggaaggtggctgccaccgccgtggtccacagggcctggccagggctccatggggcagaagccatgcccagctcagggggcttcactccactctcccactttgacctggtccctcccctctcccccagagtgacctggacactagcctcctcccagtgggagacagatgtgggcaatgcagctgctgttccctgctcagggcaggctggtgcccaaggactgcccaccagaccaggggataagaggttggcagcatcgtccatggttatcccacagctaggaggctgtgggtgtgggagaacatgctgggtaggggtgcctgtgtgcctctggagtcgaggcaattagaggccctgtggaagcccctgcacgcaaggggcccacgcgccagggcagaggacatagccccttcttgcttccctgagggacgggaggcctgtggacttctggagacaatggcagagtcagggcagccaagccgggccagtgccctggagccgagtcctccccccacctgcccacatgccccacccctctccaagcttctcccctcataggatcccagagccccttgggacctctgtgaagactgcatagatgtgagggagtctcagccttagggtgggcacctgggcgcagctgtcaggccccaagtcagccccaggcacgtggacctgggagccagcctcaagggcaggggtccccgagcatccccactgctgccccgccagcaaccgtgtcactgggaggcaagaggctgggttcctggggtgggcaggcttccccgcttcactccatttgcagcccctgtcttgcagaggcaaaatggaggttcagagaggtgagcaaacaccaggtcccatgtttgcacctggctgtgaccgtgcagtccactgggcccagcagcaggaactggggcaagtgccccgagacgggaccgagacaacagtggggaaggtgggacaggcanctgggggaaggccagagtgtccagcaccagcgccaggggccgttccgacaggctgaggaacggcggggagcggggcttgccaaatatgtccagatggggctggagccccancaacttcctgccctcccagcctgctcccccacctcctcacccccttcccaggctgtcagcaggggctggggggcagcagaaccccacttagccacaaggagtgcagccaggggctggctcccgggaggacatgggcagaggcttaggtccccttacacacacacactgctgcattcgtgcaggatgggctcagcgcctgctgtgcctggcgtggctgtgtgcatggcatggtggtggcatggtgggagtggtgtggcacatggtgtggcacatggcatggctggggctggggctgggttgtgtagcatgtggagtggcaaggtgcgtgacatggtgtatggcatggtagtgtgcccctcgagccatgtgtccaggtggggcagatcatggagggcgcccaggtgcggtgctgaggctgagcatgcactggctggggagggtgggcagagcaggaggaaatcccttgttctccggagctggagagccagaaagagccctgcagcctgggcctcatcatcacacctcgccctcaaggcctccaggcacagcatccactgccagcctctgctcctgcctctgagggtctgtctccaaggtcttttgggggctgccccagctcccccaacacagacagcaccagagctgggcccacctgtgaggtgctgagttccccatctcagagactgtgcgagcagaggcagggaggcgcttgatgtcggatggagaaaggacaggggaggggtgtggggctaagggccccgccaggtgaaggaacaagcttggaagggtgtcgttatgtatgagagttggggagacacccccaagccccagatgggcttcgaatgccaggcagggccaagctgggcccagaagtgggaaggatcccttggctgccccaggaatgcaggttccggggcaagaatccagccctggctggttgaagtccatcccaagtctccctccccacgaggctcctgcagatgccaggaatggggctggattccagattccaagcctggccgcccagcccctatctgggaccccagcccagagcccccaggcctggcctccaacctggccccagcctcaggggagctgaattcagagaatcctgtcctaggagccagaagcgggggagggagggaggccgcccttctcttgggtgcaggccagggggctggggctgcccgcccgttttggttaaccggaagtgccaacccgcccctggcggattagtgggccttcattttccagccttgcttgaggtgggaatagcagtgaggttggacatccaggcacctggaaggtgggcagggctccctgcggctggggtggccagtggcacctggctgttgcccccctgcaccccagccctttggcccccaagtgtctgccacctccctggggttctgctcccatattcctcacacccagcacagaacccagcatgtctcctgtagacacctgcatataaaccctgactcacacacacacacacacacacacacacacgcacacatgcaggccaggctcctcggccagtcaccctaccggcagagctctagacatttctggcctctggtgactattcttcaggcagctcaccctgcaagtctttattgagcacctactgtgtgccaggcagtggtacagcaagggcagaagccccacctccaaggagctgaccccctgccgtggcagagacagaaaacaaaggcagcaccacagcgacgagggcctgagaggaaagtggagcaggagcctgcagcatgctggggcaggggtgtctttagaaagggtactgggagggccctggcaagggacttaagtaattacttaaaggagggaaagggtggcctggggctcacagaggaaaagccttcctcatggaggcggcggggcatcgggctcaccctgcattgtccaggagcgacgggaagcctcgtggggctgttgggagacagcaagacctgggtcagcagagcaccgtgtggggtaagcagatgacagggcagtgacaggtgattcggccccggtcagtggtcccaggggtcggggacaggtgggaatcgaagtcataggaggcggggcaaaggccacggggaaagggacagagctgctcccaaggacgcaccaccatggggtgccccatggcgtggcgggggtgggggtcaggacctttagcagaaggtaaagatgagaccaagaggcagatgggtggaagagttgaaagcagccaagtgtcaccaaggcatttctgagggagagggacacgactagtggctcaaatctttagaaatgaggggatgggtctggtagagcaccccagattcaaggcgggtggcttggggaaagcagggagaagggtctggaaactgctgctgagcaggagcccccacacccacagagcaggtgcagggaggcccatctgtccatccgtctgtctgtggggaggcatggtgacgtttcagcccggaggtagaagttttcacccaggaggtagagggtgaggccggactgcactccaaggggaggaggtgggagagcacagcctggctgctgccaccaagctccccagaagaggggacccctccccccgaacaccagcacatgtaggcagaaagacttggcgtgtggagccctcagcttccacgcccaccagcagggactgggtggtgatgtcagcaatccccacagaaaggagggctgcacagccgtcccaggagccagcactgtccccgtgattctacatgcagcctccacaagtgtgtcgcatggaaacaagcagtggagagccacatgtgtgtcacatcacgcctcgcctcactcgtgctaaacctcgctgaccaggcagaaccaggcacgagctgcgtatcaaagttgctggaaggagaaacatcagatccctaagctggttacctggcaggcaggggccctagagggaaatggggcaggtgaaatggagatgtgtctttgaaatgtctttatttggcgggagaacgtcttcatagggtacttataccatgaaaaaccctgtacacagactaattttgaagcaaacatgtgaggcgttcacagaaagggttcaggaagacaagcaccccagccgcagagagcccgtgggctgggggcacggggcatggcaaccctctcctggggatgggcaggatggggcacgtagggcggaggaagaggctcacatggtgtgcgtgtttgggagcaccctgggcagcctctcgagtgtccagagagaggacaccgtcttgagccagcagggacagccaagagcgcccggggagaggcctgggtggagacagaacacagcaggctgtgggcgtggccaatgttgagggacggaggtggccagaggcctctcagtggtgccccagggagctggggacgaggggcctcatccttcccctgagcccctcccttcaggcccagggagtggcctggggcccaggagagcccgctccgcgctcacagcctccgttcccagacacgcccgggcctgagcccccaggctgcactgtgccacagaacagactccccggcccctccctgctcgagaggtgaccaaggcccagggtctcccagcgagcaagaggccattgaactgttgttggctgtgcagtgccctgccctcggggaggcggcctctaagaagcacacaccaccagcaggaaccgggcagacagaggtgggggatggaaagcaggggaagtggccacagccaaaccaggagggggaagggagggggcctcaccaaggagaccctcacctggggcctggagaatgagaagggtctggaggctaaggagaggggtggatgctccaggaggcagggccagcccatgtgagggtcctgaggtaggaaccagaggaaaccggctctggggcgagaagggcagcgcccagggggccacaggggccggcggcgagggaccctcagccgaggctggtatctcgagaacagcagggatgcctcaaaggttctcgcccagcaagtggacattgtggtgtgggagatcagcaggtgccggtgctttctctgtctgcaggaaggagagggggtgatgggccccagaggcctctgtcttagagaaaaatggtggcaacgtgggacagactgaggaagccagcccagaaacgtcccgtcccaaattcaggaatatttagggtatacctgctgcacgccaagggcagtttcaggaaggggacctacttctgagaagcaaacaccaccagtagggaccaggcagacagaggtggggatggaaggaagccagactgacctcacgtggctcacagccactggcagggtcgggggacaggtgccaaactatccacatgcccgtcaggcacctggaggagtgtgaaacggcatgcagaaagaaggaagcaggcttggggctgggggccagggaccggcgcgctgggaagcaggctgcagagtgaggccagggatgggggctgggccagaccacagggttgtgagcggactctggcattgatccggagccactgagggttagagcctatgacaggggtctgacttccagtggtatggggccaccctgctgggctggggaagggaggcgagaggaagtatctaaggtctgcttgtggacttccggggacagcgaggggtattgcaggggtcctaggggctggtgcaattcagaggttccagatggcccagcaagtggctgagggcccagggtaggggaggatgtgggggcagcagggccgatgtgggcagacgtggagcaatgacacgagaacggccaggcagccntgggttttccctgcccacctgccccgtggccgggttggggtttggctgaggcagcagagcgctcgctggctgcccgaacaaagtgttctgcntggtgtccctggcaatccgggcttctgcgggctcgccagagggggcagctcaggaggcagcggcagagaatcaaatgcaggtggggcgtgtgcccaccgccagcacaaacacggatcatgggcccccagcctgccggaagttcctgcccgcctggcccccaaacagaggccgatgggacgagccctgcccggggttgcactaggtgggcaggtgggcaggtgggcagctgcctcgggtttttggacagagccgcccctgcctggcgtctgccggcaggaagctcctgaggccgggctagggataggccagcccttgggggaggctcgagaccccatccnancnnnnnnnttccccaccccttcccacctgcctggcagtgaggcagctccctggcctctgggtgcacctgggcctcctgcccaggccccttccaagggaagagggcaaaggggctccagtgccacccagggagtgttgtgccacgtgggcccccctggctctgccactgactccctccatgacctctgtccccaccctgaagttgacatgaatgtccgcacggagcatcctctgcaggtctgtgaggctgtggatgtgacagctctggctctggcacaaacgtcagccccaacccacatgcagggagggaggtggctgcgtgtccaggagcacggggccatgtggcaccggctcatgtcagcagacacggcacacatagaccccctgggggctatgacgaggtgagggctgagccgagggagaatccaggaaggcgtgcgggccgagaggaagaggaagggaggctgtggtggctggagccagctgggggagggaaggcagcaggggatgggatccctcagcccccacagccgtggtgcggactttgttgtttgctcagagtacaaagaagaggccttctccgggttcttagcagacgagcgcgacctctccgaccagggagacagacaagaggggaggttatgaggtcacctgggagaggtgtgggttccagctcccgtcgccactccccgactggatgccagaacgagcctgtcgtctttcacctccagacagcagggccctggctcccagtatcaaagcatgtacaagagcggtctctagggcagttctgcgtagacgccaaagtacaggaagacgtgcaggaactttgtgccgtcgacccttgaacaatgcagggttggggcaccgacccccgaactgcccagtcaaaaacccatgtataacttttgactccccagaaacttcactaatagcctcctgttgactggaggccctaccaataacataatcaattaacacattttgtatgcttcatgtattacaataaagtaaagtaaggaagagaaaagatattcattcagcataagcagatcattgtaaaggtcttcatcctcgtcatcttcacgttgagtcagctggggaggaggaggggtggctcttactgtctcgggtgacagaggaggaagaaaatccacgtagaagtgcacccacacggctcaaacttgggttgttcagggtcgatgatacacaaaaaggacattctaatccagtggggaaaaggtccatcattccataagtggtggggtatcagcaggataacctgcaaaagtaagtctgtaggtcagaaatcaatcccaggcgattcaaagatttagggggtaaaacacaaatcaaaaaagtattaggaaaaaagattttggcgttggaatggaggaggcccttccaagcacgcacaggatgagaaggcataaaggaaaagatggatggctttgaccacgtgaaaaagtgaaaacataagtaagacctctgtgtggcaaaacaaaaaaataataaatgccataaacccatacacgagacaaatagcacactagggaaaaacatgtgtgatgtgtacttgacatctttcttaacatagagtccttacaaatcaatgaacgtgaaaaggcccagtcccagcctcagcttctctgctcagcacccaccctgggaaggagtgggcttggggggcttctaccccctcactccagccttggggccccgggaaattggccggggcctcacttactaattcaacaaacatttgtgcagcgccaactctaccctccatgtatttactgggcaccttctaggctccaggctccaggctctgggagactgtctagggttaagacggtgactgcctggcctagagctgggcctccagctggtggcaaaacaccaagcaaggagatcaataaaccgggacatttcagggagtggtgaaggcttacaggaacatggggagagatgagacgaggaggccgcccaggattttgagctaaggttacaaagcagcagaggacagcgggtgcaaaggccccagggcccaactgagatgggcgctcagatcaacacgggcatgctcagtgccggagaggggccagcggagcctctgggggcactgcaaaaggagactggattttactcccagtccagtgggaattctgcagaaggatttggcccaggctgggagggaaggctcagcctggctgttgcctggaacaagcggggaacaggttgggggcatagccaggcagtgaggtggttgtgacagtccaggcagaagatgctgccagcctgggcaaggggcatggggggcaggctcagagcacatgctccagaccagagagccacagacaccaggtgcacaccagggaccctgggtagttggtcgtgccctgtggatacaggattcgggccggcttgggaggaatctgagctcccgctgggacacgctgagctgtggggctgttggcctgcaggccttggagcccctggagagagcaagtagctgacggggacatcctagctagccgaggtcccaggaagggaacgagggtcgtgtggtgacgatcttgagatattcccccacagtcgtcagccagggacatggcgcccctgaggcccttggggggccaagcatccgtcagtgggcagaggctggcaaaagtggatgtcagcagcagggggaagggtctttctttcaccatcttgggcctctctcagagggaggcaaccccgctcctggggggtggtcagtgagggccagccaggcagcggcagccccaggaagggtgttggggtggagctgaccaggcctctgccgcatggttgcgctgtgccgaggacccgctgaggacataaccgaccatgagcggtgtgggtccccagccgcagcagagcttcctctggctgctcggcagacaacagacaccagggacagagacaaggttgaggatttggtctgcagcctctgagcggacacactcaccctcagtgcgtgccaattcagccccaccacaggcgccagtcccgagcctgagcacaggggctgccacgacgctcgactctctgggccaagactcacacacagcctggacactgcccgggtgaagggctctgggggacagggggagcagctggtatgtgtgtgaccatgggtcccagactcagtgccatctgtctccccattaggagatgacgcctggtacctgcccaagcacccaagccatgggagttgctgcttgctctccacgcagctttgtcccagcagcacccccaactcctgtgatgggttgcagggggtgctcacctctgtggcacacacaaaggcccaggggcctgggggtgcatgcaggtgcactccaacccttgggcagcccagagaacaacctaatggaaagtgaagggaattgtacaagtgtgtacaagggtgcagggtggttcctgccttcttgcacgcacagtctcccacactcatacagccacaggttcgtacgaggtacacatatgtgggctcacctagcatgcctcccgtgtgcacagcagtgctcctttggcctcaggccacaggcatacatgtgcaactgtacgtgcactctaggaatccctaatgatcatggccatcgggtggctcgcagtgcactgagcaccatgctctgtccctggtgtcttcatgcctcagtccacttgatcccctcagcatcctcctggggaaggtgctacagctgccctgttttataggcagggaaactgaggttcagagaagcaaagtgacttgcccaaggtcacccggccaggaagcggcagaggcaggatctgaccccagacccgctgcggcacacacacgcctgcctgcacgctcccgtgaggaggtgctttgtgcccaaggccctgcagcagtgtggggggttctgaggccatctcccactggccacagcacagcaagctccagcagggcagctgccccaaggcctggcggtaaaacctcagcagcgagaaacacggtcgacttttgtccaagaactgaagcactaaagcaaagtcaaacacaatcgctccatgccctgccacgaaccgcgaccttaccacgtgctgtgacctattgccacttgtgcccagctccacacaggagccgggtctgacatccgattgctcagagcctggtatgaaacattctaggtaccgccctgagagtggcttagtaactgctggttcctcaggacagacaggaggaaggccaaggtgacctttgccctgcgaccctacagagggccctggggaggccctgcctggtctttagacactgcccaacaaggatgctagaaggggcagtgagttttctgcctcctggggaactgcagcccaggcagagaacaggacccccaccctgggagcagcgggtgtgcccggcctctcccgcctgtccctggccagtctgccatccacgaggccagggcctttggcggtcctaggcggggatcaaggccgggcaggttctgcaaaaatttcccttgaaagactctttttcaagattttcttttgaaaacaaattcataaccacatcaaacaggaatccccgttgccttgggtttgatcgccggccgcccggggctctctaactagctgttattctaattgcttttttctcttccgagggctgcataggtctcttatggttattaatttggtgagtgcaggccgggcacaaagcagcttttgtctgccttgccttttaatcactatcaaattgcaaataatggtggaggctgagatccccaaaattgatctgtcccagcagttcttggggaaccggccccagtgcatagagcatgcactgccttcccccagggcggcagctccccgatggcacctgcccggatgcacctccgcatgggtggggtctggcctcggccatgggaggtgcttctcaggctcctccatcgccaaaaaaaaccaaacgtgccagcgagatgaaggcgccctgcccgcagagtggtggggtgggactcttcagggacacgtgctgtgacaagtgcttgagtcagagctaagactctggggctgccgaggagccacctgtagcccaggcctgggcccttctcacaagggggcggcaccatgatgcatcaaactgtggaaccgccctgggcatccagcccacatcctggcccacccccggggcctctgtcaccagcagctgggatgatgagagcatgtctctggggccagagaccctagccagtccctcaaagccccagttggcacaggcagcagttgaggtgagcctgggaccagccagagccaggcatgggctgacgctggcccaggcagcttcagggagcccttcagtgtccgtcggaggcaagctcggccctgtggctgcctcccgaccccaaaggtggctgagtgcctctctacacggtgccgggactccctgccgggaggagctgtcaccaaagtggctcaggactgagcgctgattccagccacaccctcagcctgcactgcctgcctgcggccctgacacccactgtctctttctgtcccaagaatcccctgtgaaggcctccacacccattagcacatgtgggacttggacagatgttcgagtgccataatgtgaaaatttatgaaaccacaaatgttcatctgtgatgtatttggtgctttaattaatgccaaaccaattgatacccaagctggggcctgcacagttagtgacagtaagccacgcggggcaaacctcgttccacactaccagtatgcggggcccagggagctgaggtgagccctaggacacaagcccaggctttgccctcaaagacccacgctggctgcacctttgatctgttacgctctcgtaggtctctgggcgtcagtttcctcatgtgcaccctgaaggctgagagacctcccatgacccctaccaggcatgagcaggtcgtgggactgagagggctggtcctgccggcagcaggagccacgggggtcagggtgtggctgaacaagaacgagacctcaggccgttccccttcccagaggccccgccccaccctgccttttgctttcgccggctcctaacttgacacactgtgtccccccatatggcagctccgtggtctcgagatggagccttggggtgggagctgtggggacaggatgggagacatggcactttcagccagtgactctgaccttcttttcctgggcctcagtgtctgcatctgtgggatggagtgtgggcctctgtggctcgtccccaagtggctttgcagagcactgaagtgctggcgggtccttgggtgtgagagaccccggtggatggccgtgggcccttgcccgtgccaaaccacagaagtcctgcacccctttcttccatagtgtgggcctcacatcaggtttatctgggaaaaataaaacatggggctccctctggcctggaccgtcagacctcggatgtacacctgcccttgtgttcaggacagttgggtctcagactcaccccatacctgcaaggcagaaccacaggggagccagggagcctccacactgcagcccccaccacccagggctggaagtgggtcccctgggctcctgctctgggcagggcacagtcccaccctcccaggtggaggctgcccacctagccctctagacagacgctcggccccactcaggcaggcgcccccctctcatctcaacctctcacagcaccctgttggccgcctcttccttagcctgctcagcctccgtggtaggtgctgtgggtgaccaccacagcacccaacccttgaagctggcccgggtccacccagaccctagcaaactggttggaccctctctggccatcccggggcttgtgcccaccttcacccagcagcatcttccctggggttgttctcacccgcacagaacccagccttggcccacacctcaccccaagcctatccggctggatcagcagtggggccgggcgcatgagggaccaggcccgcccggcgcagcctagggtgcagacccctggagtgcacggccaggtggaccgggccagctcccgcctgctgcctgtgcttagggccagtggttgacgttgctgtggctgagtcatcttcgtgcctctctctggagccatacgtttccctgaagcagctctgctgttcagcccttatcgcgtgctgatctgtttgcccctcccccaccacttctaggtctttccaggcctccaggtacccacggtgggggagggtctacttcattctccacagagcacgctgaggggctctcctgcaagaacaccgcaggctgaaggaccagccctgtctcctgtggccaccaacagagctgtgcgccctccccgaaccctcactcatgctagggcccccaggtccaacctcctagggagaggggtccccaacctggactccctcacctgccctagtctgcccctggggttggccctgctccacccagcacctgctctgagggtgccagggtgccggcctgccggccagggccttccagtctccccatcaaggctggatggccacttcccacccggggcgggctccagcctcattccccagcggtgctgtccttccaaggagctctcagatcacctggctgtccactcgtttggggcttctctgctgcctccgcagcactgcgaggcctctgatcacctactctctgtgctgggtgcatttcgggttctgtcctgccttgacctccctgccagctttgcagggcagccaccctggcacatagctcactgcagaaccagcccctgagaaggtggaggccacatggctagccagagggcacgctctagggcactgctctgaccacagaatgtgggtgcagatggtgtctgggaaaatagtggtgtccccgctaggttaaagacatggcataatggttcctgggggatgacaaaaaaacccacccccacccccttgcagaaagcatcacagaggcacaagccctgtgccctgcaagcccctcctggaagtggcccagcaggggcatcccctgcacacccaggcaaagcccaagccctctgcctcctcaaccaccccaggccctgcccatgagccagccttgctgaactctgccctctgtccagttctcctccagacacagtagacatagcccccagcctttcttgacccttaacccaaatgtccccaagcctggcctcaagaagccaaaggctgccgcaaacccaaatatttcaggtccgggtccctggtgcagaccctgccatgcggggatgtggcacagaaggccggccagcctggggagcagagaaggaggagaggagagctcctggccttgagcctgaatgcctgtggacacatatagggactcccagcacgcacgggatggattccaatcggcacacatgcacattccttgcacacacacaggcgcgaccgagggccttgcagacatagggtgcacacgtgcgtgccgcctgcatacagcatgcacttgcagagacggttggcaccttcccttctctggccccaaacctgggccctgaggctgtctgcacacctgggtgcttcccaccactgactctctcgtctgcctttgtccccgcaggtgacgcagctggaccagaggctggcactcatcaccgacatgcttcaccagctgctctccttgcacggtggcagcacccccggcagcggcggcccccccagagagggcggggcccacatcacccagccctgcggcagtggcggctccgtcgaccctgagctcttcctgcccagcaacaccctgcccacctacgagcagctgaccgtgcccaggaggggccccgatgaggggtcctgaggaggggatggggctgggggatgggcctgagtgagaggggaggccaagagtggccccacctggccctctctgaaggaggccacctcctaaaaggcccagagagaagagccccactctcagaggccccaataccccatggaccatgctgtctggcacagcctgcacttgggggctcagcaaggccacctcttcctggccggtgtgggggccccgtctcaggtgtgagttgttaccccaagcgccctggcccccacatggtgatgttgacatcactggcatggtggttgggacccagtggcagggcacagggcctggcccatgtatggccaggaagtagcacaggctgagtgcaggcccaccctgcttggcccagggggcttcctgaggggagacagagcaacccctggaccccagcctcaaatccaggaccctgccaggcacaggcagggcaggaccagcccacgctgactacagggccgccggcaataaaagcccaggagcccatttggagggcctgggcctggctccctcactctcaggaaatgctgacccatgggcaggagactgtggagactgctcctgagcccccagcttccagcaggagggacagtctcaccatttccccagggcacgtggttgagtggggggaacgcccacttccctgggttagactgccagctcttcctagctggagaggagccctgcctctccgcccctgagcccactgtgcgtggggctcccgcctccaacccctcgcccagtcccagcagccagccaaacacacagaaggggactgccacctccccttgccagctgctgagccgcagagaagtgacggttcctacacaggacaggggttccttctgggcattacatcgcatacaaatcaataatttgtggtgatttggatctgtgttttaatgagtttcacagtgtgattttgattattaattgtgcaagcttttcctaataaacgtggagaatcacaggctgggctgggcactgctctcaccttggttcctggggcatccatggggtctctcacagacaggacccctgcagttcccctggaagcagtgcccaggtggctgtggaataggaacgctatgtccgtgtactgaggagtaggtcagggttcagaggggctgcaagatgccatcgaaggctctagcttaaggacgtcgctcctgttctgggccctggggctggccctggccatgaagtgcagtcacagtgtggtcactgcctgtcttccagcagactctatgcccttgcggcagatgggctctgtctgggcctctctgtctgcccctcccaggccagggtggcccttcatcaaggacccacatgctccactctgggagcaggccccacccaggcccattccccaggatgccaagggctaaactctggaggggttgtggtgcaaggaaggcctggggcccctgaggctcccatatgctcacccctggcctcctccgggcctctatttccccattggtaacacgatgctcccttagcctgtccagttctctgagtgggacagaggggccaccaccctgctcgccctgaccctgttcctgcagctttctgtgaggcccgcctctcctaaggtggaaagagtgcctcactctcggcacagacacactcaaccggggcaggtgcatctgctgtgcccccacctcagctattggaccgtttctcagtccttcaggactgcagccgccttctgtcctctttccagagcccatcccgaagtctcaggatatgagggcttggggcatctgagatatcaaggatggggctgtcctgagtccactgggggcaggaggcggccagcagcaggtggcagggacaggggccccaggtttctgtgtggagtaggggtggaagcccttgttagagggaaaggccctgggtcccacctggtgccaagcccactgggcccgtgcccccaacccatgggtcttggcatctggcctggccagcactgaccgggatggacgaggtggaggggcagcacggggcttcccaggcttccctggcctgcacccctccgggaggagcgggagcagcagttactgaaaggcaggaactgttgtttccttgttgggtaaatatttgtggaaacccggggatgccggccggaaagcagggccctccacagcgcccaggccccccagccccggccgcccaccccgggaccctggcccacagggagctccgtggggccgcccatctgggccgggcgcggcccggcacccagcccgccttgttgtccatattatggactgcgcacaaagtgcccgaggactcctctcctggacgggccattgcagccctctcgggtgtgaaatgcaatttacctgaaataaagcccaattatggaattagctaattaaagccatggcggaggctgggcctggccggccgagtgctcaatgcccgccggtgcccgtggactgagggaacagatggcgcctcggcccgccgtgccggccgcattccttcactctgtcccccgataagtgacctagacagcacacgaccatctggtgtgtggcacgtcctgcgggccccggacaatggcccggcagacctctctgcgagagggccgtcgcccgggcaacggtggcatgtgcagccccgacccattcacggcccctcccgcagcccctttcttcgggccctttgtggcctcaccgcggctgcctggctgctctggctgaggatagccatgagtgtttgtccccagagccggcctttgtctccaaattgggctcccttattgaggtcctcggggtccaatgggtgccaggagcatctgctgggggtgactgggggaggggctgctcctgcttcctggggcacccacctcctctgccaggctctcctcccccgttgcctgcccccagatgtcccctcgtgggtgctgggcgtggccatggggaagcccgtctctagggctggcactggccaagcccgaggttctcccatcttcgggccagggagccaggaggaggaggagtcaagggcggggccgacctgcagcccctcagctcccaccccagtcctgtctgcgaaatggggaacagtaaaagtgccccctagaaggggcgtacggggcaggggcttgatggagatgagacatgtgagcacacagtaggtgcttaataaaggaagccaaacaaaccacctgggtgggtgatactgggctctgcctccttgctgctctcctgcctgttgcctcggagctcctttctgaggcccctcctgcatctagccttaccccaccaagctccctgcccctcggtgccagggagagctgtccaaacccaagctggcagttccccatcctgctctcaagccaaccatgactccccactgctgagtgggcctgtgaggccccacaggctgcaaccctgccactcaccctggggcatccccccgccatgagcccagacttcccccatcctcaccctggtacttgacgtccagcccccctccctactcagggacctcctctgagcaccatccttggcaggcagtcccccaccagcgtggtggtcaggagtcaggcccaccactgggagaggggctgtgctgggcctttgaggccccaaaaaggagccggggctggcagtgcctagtacaagcctggccccagctgggtgctcaggaagtgccagttaaattaaggaataaaatgaaaagttggaaggaggctgcccagtgctgcatgtgcagcagaggtaccaggacccaagcagggcatcaccaggcgtccctccaatggacaggagaggggtccacaccctgcgccctgaaggagggatcaggccaggtgttttgatctggggcagccagacagctgggggaaggagcaggaaggcagacaagagccagggctcctggggccaccacacacagcacccccatctccaggggatttgctgagtcacctgcagggatgaagactgccctttctcaactatatcaagtccctaatttggagtgcccatctgagctgtgccaaagcctgctccccccagcaccccagcctcctctcagcacagccctccgggctctaggacccaggggttccttgcgaatcttttttttttttttttgagacggagtctcactctgtctctcaggctggagtgcagtggcacgatctcagctcactgcaagctccgcctcccgccat

SEQ ID NO: 269 - DNA, 3154 bp, Homo sapiens
gctcgctcccacaccgccccggtgttggccctcgccatggagcagaggcggggacagctggccaccgtgtcccaggaccgtaccgtccgcatctgggacctggccaccctgcaacagctatacgacttcacatcatcagaggacgccccgtgcgctgtcaccttccaccccacaaggccaacctttttctgtggctttagcagtggggccgtgcgctccttcagcctggaggccgctgaggtcctggtggaacacacgtgccaccgaggagctgtcaccggcctgaccgccacccctgacggccgcctgctcttcagctcctgctcccagggctccctggcccagtacagctgtgcggacccccagtggcatgtcctccgagtggcagcggacatggtatgcccggatgcccccgcgagccccagcgccctggcagtcagcagggatggccgcctgctggcctttgtgggaccctccaggtgcacagtgacagtcatgggctcggcctcccttgatgagctgctgcgagttgacatcggcactctggacctggccagcagccgcctggactcagccatggctgtgtgctttggccctgcagctctgggccaactgctggtgtccacctcgtccaacagagtcgtggtgctggatgctgtgtcgggccgcatcatccgggagctgcccggtgtccaccctgagccctgcccctccttgacgctcagtgaggacgcccgcttcctgctgattgccgccggccggaccatcaaggtgtgggactacgccacacaggccagcccaggcccccaggtgtacatcggccactcggaacccgtgcaggctgtggccttctctcctgaccagcagcaggtcctcagcgcaggggacgccgtcttcctctgggatgtcctggccactactgagagcgaccaaagcttccccggggcccccccagcctgcaagacaggcccgggcgcaggaccgctggaggacgcagcgtccagggccagcgagctcccccggcagcaggtccccaagccatgtcaggcatctccaccacggctgggcgtctgtgccaggcctcccgaaggtggcgatgggcacttgcccgcctcccgccagcggtgggtggctgcgtctgaaggctgtcgtcggttacagcgggaatgggcgggccaacatggtctggaggccggacacaggcttctttgcctacacgtgcggccgcctggtggtggtggaggacctgcactctggcgcccagcagcactggtccggccactctgcggagatctccacgctggccctcagccacagtgcccaggtcctggcctctgcctcgggccgaagcagcacgaccgcccattgtcagatccgcgtctgggacgtgtctggcggcctctgccagcatctcattttcccccatagcaccaccgtgctggccctggccttctcaccagatgacaggcttcttgtcacactgggggaccacgatggccgcaccctcgccctgtggggcacggccacctatgacctcgtgtcctccacccgcctcccggagccggtgcatggtgtggccttcaacccctgggacgccggtgagctcacctgtgtgggccagggcactgtcaccttctggctccttcagcagcgtggggcagacatcagccttcaggtgcgtcgagagccggtcccagaggcagtgggggctggagagctgacctcgctctgctacggggcacctcccctgctctattgtggcaccagctctggccaggtctgtgtctgggacacgcgtgccggccgctgcttcttgtcctgggaggcggatgacggtggcattgggctgttgctgttctcgggttctcgattggtcagcggcagcagcacggggcggctgcgcctgtgggccgtgggggctgtgtcggagctgaggtgcaagggctcaggcgccaggtgaacgaggtggtcttcagccccggggagtcccactgcgccacatgcagtgaggatgggagtgtgcgggtgtgggccttggccagcatggagcttgtgatccagttccagtgctgaaccagagctgcctctgcctggcatggagccccccgtgctgtggccaccctgagcagcagcggctagcggctggctacggtgacggctccctgcgcatcttcagcgtctcccgcacggccatggagctcaagatgcacccccacccggtggcgctgaccactgttgccttctccaccgatggtcagactgtcctctctggagacaaggatgggctcgtggctgtgagccacccctgcacagggacaaccttccgtgtgctgagtgaccaccagggcgccccaatctctaccatctgtgtcacgtgcaaagagtgtgaagacttaggggtggagggcacagacctatggctggctgccagtggggaccagcgggtcagcgtctgggcctccgactggctgcggaaccactgtgagcttgtggactggttgagtttcccaatgcctgccaccacggagactcagggccacctgccaccctccctcgctgccttctgcccttgggatggggcgctcctgatgtacgtgggccccggtgtttacaaggaggtgatcatctacaacctctgccagaagcaggtggtggagaagataccactgcccttttttgccatgtccctgagcctgtcccccgggacccacctcctggctgttggctttgctgagtgcatgctgaggctggtagactgtgccatggggactgcccaagactttgccggccacgacaacgcagtgcacctgtgcaggtttacaccttccgccaggctgctcttcacggccgcccgcaacgagatccttgtgtgggaggtccccggcctctgagatgcagcagggactgtggtggtgggcatcacgcctggtcatgccaggcacctggacacaggcttggcagaggcgccaggttgtcaatggcctcatgctgggacaggccaggattcacgtaaatcgcctggagcaagctgttgtaaatttggcgccctgtgaatactttcatacctgttgcccttttgcctaagaaatctttaatgtttctatcttgtaataaacatgggcatttatttcaaaaaaaaaaaaaaaaaaaaaaa

SEQ ID NO: 270 - DNA, 31737 bp, Homo sapiens
gaattcctaagggtgtttccagtgtttccaggaagcttagccagcacacccactccgccccgtaggggtcaaaggtctgtgttagaggtggcctgggatgatgtcactagtgcacgtgccccgggatggttgccaggcaatgaggcttcctcccccttctattccctcccacctctgccccgagtccagttccagtcccgtgccatctctttcccctctcccttcccgtggtcttagcatcctgcaggtgggaaaccccggcctggagttttgtgagggggaggggcacgggtgtggtgtggctgaaagactttgcccctttgctgggctgagggagccttgggtcacttttccctagattggcacagaagagcttcccctccaaggctccgcccccatagaaaaagctacctagccgtcattttactttcccacctgctgcatggccaagtgtcctattgcccccttccccagattgatttgaagtgggagtggttgaaagacggaagagttgtgtgtagtatgggggggggttcactacacaccagcttatccctgaaatccccataatggcacacccccatctgcaaacaatgaaaggaaaagggtcaagaaacagtattaggctgaaaagtcagggtctttattgtgtgtatgcgggtgaatcggtttgtagcctctcacttggtggagggggactcagttgattgctatggttgttcttctctattaagtcccagggttggtgatggtattggaatgaatcggtttgtgcttttatgtaccttagagcttgggctgtcagatcagacctggattctaattctagctctgtcacttagtggctactaggacttggagaggtcagaacctctctgagcctcgtatgttaatcttgaacatttaaatatcaacacctaccttgaaggccgctgggaggaaaaaaatgagataatttatgcaaatcacttagcacagtgcctggcacagaatgaacacagaatgagtgcttgttgttatgaaatacttttattattaaatggtgttagttactagtttattattattgctgtgggtctgctccaaaccagcggtaaccgtaggagtttgttaaggggtagtggatagtttgtgttaatttggagattggggttagggggctggggattagcttcaactgctttgtgcattttatttgatgaaggctttaggcagatttgtattgctttctttaggattatttttttttctcttggacaagaaatagctaagactattccgtgggccttgaaaataaaataattgtattatggttcttgattttgaagcaagaccccagccccctcccgtgttgatctctggagcctttcgttttgcagagggactccacagtttctctagtggggacagggctaggctgaggggtgtgtaaaaggttggggtgggtgggtggagagagactagtgctgggggctgggggggcgggtagttaaaggaagagaccggaagggaggaggagggagcctgctggtggggagggagggaggggaggaggaggtggaggaggaggaggaggaggagggagggggttggggagagcctgctacagttctttgtttgactccgggactcagggacggggaggaggagggagggaatagaagggggaggaagcccccccccccacacacacacaaacacacacaccccagctgttggacagatgaattacagcctccggcttggggccagggctggtgagggattaaagctctggggctggccctttaaatggctgttagcccctcccccactctgttgtccagacacccctcacacaccctctgaccccctaggcttccccctcactcctcctcttggtctgtcctaaagtctgcccactctgctctcgactagccctttcctagtccctccccccagcacaaccgcagaacacagatgccacagactatagatacacactctctgctcccaggttatgagcctccctgtcctggagagttctagcctgaagctcccttcccgagcagaagggccttgcctgcctgacctctaccacctacagctgaccactaccctggcttaggaaggaggccttggtgggtcacaaatagcacctccctgggggcagtgtcatcagcagccacagaagcttgcggaacattgcatcatggagactgggggctagaggcctgagtctctgaggcaaggggaaggatgggggccggaaggctagggaatatagagattagattgggaccccaagtgtttgggtccataagggcagagaactatgattaagggagcagaaaacataggtccctgaggagcgagtctgaggtgagggccaacttagctctgacccctgatggacacctgattcttggccttggacttatgctaaaagacctagcttcttgtctatgagggttgggaagggagtgggcctgtatcaccttcttaggccacataagaggaaggaggtgatggggaaacaggatattgccttggggttggcagggaggggaggcttgcagtggaggctacttccaggcttaggcccagagtcagagttcttgcaggggaggatggcccctccctgttgggcccgttcatctagtctggctacctgtgctgctagccaagacctgcctgcacccgcctgggggaagaagagggggcagagtccagagggtggggttgactgtctggtgtcttgataaggttggagaggacacagagctgaaggaagagggtctgcatgccctggtgctaggactcaggctggcttgtgtacagatgtcagggcagctggggcgactcaggccagggagtctcagcaggagcgtcctgtcagaagagggatcacgggtttggggtctactgtagacttactcagatgccatatcatggccccttaccaactgatcgagcctgcttcccaaaggggaaggttggatgaccactttggggatggctttttctggttgccatggaaacaagattctcccatcatatctgaccaccagagccaggtttctccttaatgaggggggcagggagcccaggaaaattctccatcctggaagacccccacctctaactgacttttttcttttaggttccccccagggcaacatgccagccccgtagcactgcccaccccacccactgtggtctgttgtaccccactgctggggtggtggttccaatgagacagggcacaccaaactccatctggtaagtcctgtctgagtgaccctctctcctcagcagtctaactctgcaccacatggttggagatgctcggtatgatctggatcatgcccactcttcagaatggtccagtccaattctaagcaccccaccatgtggtgcttgagtggttcagccctcctggtttatggacctcccttctatctcctataaatggttcagccctgtacttcaccagcctctccactactaccaaaaaatcttttccccactatctccctagtgctacaactcagttgcttattgaaatgaagagggagtttgcaagctgaaaagtggatatgagctaccctggaggaattttttcttggtagggaaacagctttgtccctataggagttgttgaacaccctggcttttggagggtgttcagaatttatttggggagatagtggagatcactgccagccacagcagtcttggcatttcacctttccttccagatctctttcagtcccattctctccccactgcactatagcatttgcccccatacctaagtcttactcttctgcttccctctctccttctgtcagttctctgcctgaggccctgctttatttcccattcctttgtaggagaaaagggaagataatccctaagccaggggcttaagttctctctgtgttgttcttcctcattacatatggggtttctcgagtgggactgttttcttctatgtgtctctcactattttgcttgatgttttgcacattggggtgcatggtggatttgtgttgaataatgttaactgaatgagcttcattatgaagaacctatgacttctgagatttgctgcacagcctcctactttatcctctagaggacgtgagacattggggatggtaacatgggtagagctgaaaggaaggttgacccaggagatggcctgtgaggataaaaccaagggagggagagtaggacagaggcagtacataagagtggtaagaatgtggctctggaaagaagcctagctctttcattcttcacttgcagaatgactttggccaagtcacctagcctctctgggcctcaatttcctcatctgtaaaatgggggtaatcagagtacctcctatgtcaggttttggggaggagtaaaagaaatgcttgtaaaatacttaatacagtgcctggcatgtaacaaatattcacaaaatgctagcagttatcaccacagtgggagccacagggagctctgaggataagcagggatgtcgagggatgggacagaacttgattgaaggcagacagacctccaaattcttgactcagacagaatgatcactgatccagcgagacgtcaggatcgagaggagtgtagcaaggagtcaggagggtgggcctgcgccagtgtcgccccgactctgttcagtaacatgaaggcaaacacagaagggcatgtgcggagacacacgtgatcacgctagtgatgcagaggcagacccagacaaaagaccgagacaggagctaggcagacacacagacagagacagccccgcggagtcatgtagacagggataatgacaggaacgcgtcagacacaggcacagagggagacaagatgagcagatatgcaggtgcacgcggagacagacaccgggacccacgcacagccgaccgtgtcagacagactggtgaacacagcgcccagtcagaggcagacacaaggcctgcagtgacacatagcgggccggggccggcaccgtcactcctcggtggggggcggggaggggccggcagccgggggaaggctggggaagggaatcccgggcgggcggcctgcccgggtggctgagtcacagcggagcctcagccggcggccctcccctccgcctccccctcccccaggtaagaagcgagcgtgtaacccctcgcttccaccaggcgtgatgaggacgggcagggagcgggttgcgacgagggtcctggaccgccccacctcggcgcgcgcgcagcatgcccgctgattgccggctaggtaaaaccctatctgcgggctcttgtctctggccgtcacgtgagtttgcgtgcgcacttcaggcctcttaccacgcgtcccgcgcggctgcggcgctgcgcggaggggctcctcggctcaagcccagagagagttaagtgggtgtgattgatggagtgttctctcttggggctccagcgggggcggggggtagggggtcggttaaagtcccgagtccagggcccggatggagggggcggagctgggcttcgccgggagtgcccggatggagagggtgtggcctcggcgggagcggaattaaccctttcagagccgctggctcccgaggttgtgggtcgggtcgggagaggctggaatgtctgcctcagaagtatatcgatctcccagcctggctctggccgcgtgcgtctacctctcgcctgtcttcgaggagtctgtgggtgtcagtctttgtgcctgtccgtggttcccttcccttggttagtatagacaccgggagtcagggagggctattcttgccccagagcgagagtggaggtgagagtggagcgcgagctggcggcgactggggaacaggtgcaagcgccgcgtcggggctgcccggcacggggaggggccatcgtgggggaagacgagaggggaaattccgcgggaccggtggtgagccggtgtgtgggctgaggagttgtgtctgcctctgactgtgtgtctgtgtgtgttcagggaggcgggggctgagtcagtgggaagaggggaaggttttctgggtgactcacgctcccccaccccaagcctgaatcagaccccgagggagggctttgtacggggggcgggggggcgagtgaggagtccagcgcctgggtcccgggtgcggacaaggatccgaggtggctggcgagaatgagtgtgtgtttagtgtacaggaagttttgtcttcaagtgagggctttgtattcttgggtgctggcgtggggctttgtggataaaggtggaagagcagggagctggagggacggcactcactgacttagggaaagctgagtcagttccccgtgggaaaggggaagtggcagaggggaagtgtcatcatcgccgaaggggaagctgcctttcctggtaactggcggcgctctcgggaccacttcccaagcaggcatctgcccctctgttgtctggttccccggctccccctccacgtctggttcttgggtctcctccccgcccctgcctcggtactcgggtgggggcagtcacggagggccatacttgaccacagttcagcgccgtacctggcttggttactgatggaaaggatgctgcctctagtgaggagagagttctgacagtaataccacgtgaaccgcggagagggtccgcggggcccaagcgaccacaagggcttggcggagagtggcacgcagggacctgtagggtccaagcgcttccatgcaaacaaacgaccttgccccttcgggaaggaaggctcttttcaccagaaacccgtctgcccttgtgggctgggtggaaatttccccacagcgcagacttctctcaacgaacgcgaactttccagccacccccagcccctcgtcgcgcactctcccccggcttcctgcccggcgctcgctccagctggagcgctggccccgcccccgcggctttgtactcgacactcgcctctcgctgctctttgtactctagactctcaatggaccgatcccgggagccgagtcggctccctacctgcggggacgccgggtaggcaaggaggaggcgcggggacgcagctcctgggctcagagaggcgagaaggaagagctggggctaaagggaaggtgcccaagagaggggagcgctgtgccagtcgggggtccagtcggcaccaaagcgaaagggtggggggggcgtgaaggaggaagtgaaacgagttctgggttctttaagggagtgggtggtgagagtgggacaagggtgatgtcactgcctgtcgggccccgccctcctccctccctcaggacccccccccccgcagtacatttacacacaccgcttccgctgcgcaagtagccacgtcacgggcaacccccgaaatcccccctcccttggggggcgggggccacgtgggccgtggggaaccgcgtggccccggcggggaagggcagagaggatacgcgagccacgagagaggggccactcgggaccgcggtgcgcgacttctcggaagttgggggactaaaaggggtctgattttgggggtcggtcggtattgaagacccagaaagccaggggaagtagaggacctggaggaactgggtatgagactgggggcttgaccaaggtttgggtcggggtcaggcgttgggggtggagcgccgatagcggcgcggacgggtttgggtgccgtggaagtcgctgtggctggccagccctaagcagttaataggggcgctcggggtagggaggtctgtcactgggcgaggtgaagtgaggaaggggagggacgtcttttttgcgttctgcatccgtctgtcgtccgtcggtcttacggtggccgggcgtggggctactcgagcagcctggccgtggccaccggcggctctgggtgcttgaggcttgcgggtagcgccggcccccacgccggccggagcatgcgactaaccggcctcatccgcatgcgtcttgtcctggctgccttctggccctgacggccggagtgtcggatcctagatggggaccctaggtgggagccgcggggtcacatcggggtcaccccgggctgagctcgtctgaccggctcccgcgcccctcctcccccggccaccgctgccgggctcacctcgctcccattggttccggccaggctgttactgaggcggagacacgggtgatgattggctttctggggagagaggaagtcctgtgattggccagatctctggagcttgccgacgcggtgtgaggacgctcccacggaggccgggtaagcggccgctgcgttttgggtcggcccagtggctccggactggaagcctggcagcgcagccaccccgtccctctgaccggccttttggttccctgccacacacgtcctgactcccagccacactcctgggcctctagggagtggttgggccgggcctccctttggggaaagctaaggccgggccctttgcacaaatgacaaattggtggatgccacagtccgcccatcccagcccctgggccttgactgtgtgctggccagctcgtctcactccttttccttctctctagaattggctgtgaaaggactgaggcagccatctgggggtagcgggcactcttatcagagcggctggagccggaccatcgtcccagagagctggggcagggggccgtgcccaatctccagggctcctggggccactgctgacctggtaagggaaactctggggccgagctggctggatgtacactggcagctctggttttgcctccagtaagagcataatttcttatccccaactcaggctggatgcatcgggcagtggaccctccaggggcccgcgctgcacgggaagcctttgcccttgggggcctgagctgtgctggggcctggagctcctgcccgcctcatccccctcctcgtagcgcatggctgcctggaggcaggtgagaagttggggccctctgtctccaggcacacctctttccatctctgtatccctcaatctgtgtcattctccatgggttcctgtcattctgtgggcttccgtgcatcagccccctcctgcctaggtaggacaagactgctcctttttgccgtatataacagactccttctctctccagatgctcagccagcattgggcagcccccgcttcctgctcccctacccccttcacatggcagtagttctgggcaccccagcaaaccatattatgctccagggtgagtggatatttgaaggttctgggagtgggaggtaaggctggggccttgaaagagtcccctcaagcccaacccccacccacacccccaccccttctgctctgtagggcgcccactccaagacccctccatgggaagctggaatccctgcatggctgtgtgcaggcattgctccgggagccagcccagccagggctttgggaacagcttgggcaactgtacgagtcagagcacgatagtgaggaggccacacgctgctaccacagcgcccttcgatacggaggaagcttcgctgagctggggccccgcattggccgactgcagcaggtaggagaaggcagggcgtgggggacgggattgtacgattgtgccttctggctcagtgccccacctgacatctgcccctgccccgtgtccccccacccccaggcccagctctggaactttcatactggctcctgccagcaccgagccaaggtcctgcccccactggagcaagtgtggaacttgctacaccttgaggtgaggctggcactgggtgggttagggaggagagccaggctgtgcctgcacccgtgccattttctcttctctctttttgttctcagcacaaacggaactatggagccaagcggggaggtcccccggtgaagcgagctgctgaacccccagtggtgcagcctgtgcctcctgcagcactctcaggcccctcaggggaggagggcctcagccctggaggcaagcgaaggagaggctgcaactctgaacaggtgtgggtataggggggccagcaggcagtaagtaggcaggacttgggaatgggattctcacactctcttctctcctagactggccttcccccagggctgccactgcctccaccaccattaccaccaccaccaccaccaccaccaccaccaccaccacccctgcctggcctggctaccagccccccatttcagctaaccaagccagggctgtggagtaccctgcatggagatgcctggggcccagagcgcaagggttcagcacccccagagcgccaggtgagcccctgcctgttgcctttcacctctcacctacaagtcccacgctctctattcctcatcctgcatccctgtttatctcctataggagcagcggcactcgctgcctcacccatatccatacccagctccagcgtacaccgcgcacccccctggccaccggctggtcccggctgctcccccaggcccaggcccccgccccccaggagcagagagccatggctgcctgcctgccacccgtccccccggaagtgaccttagagagagcagagttcagaggtcgcggatggactccagcgtttcaccagcagcaaccaccgcctgcgtgccttacgccccttcccggccccctggcctccccggcaccaccaccagcagcagcagtagcagcagcagcaacactggtctccggggcgtggagccgaacccaggcattgtgagtgacaactgagggtggagggggggatgggtggagcttgtcttgaggcagcccgagcaatgctcctaccacctgcttctacacttgcagcccggcgctgaccattaccaaactcccgcgctggaggtctctcaccatggccgcctggggccctcggcacacagcagtcggaaaccgttcttgggggctcccgctgccactccccacctatccctgccacctggaccttcctcaccccctccacccccctgtccccgcctcttacgccccccaccaccccctgcctggttgaagggtccggcctgccgggcagcccgagaggatggagagatcttagaagagctcttctttgggactgagggacccccccgccctgccccaccacccctcccccatcgcgagggcttcttggggcctccggcctcccgcttttctgtgggcactcaggattctcacacccctcccactcccccaaccccaaccaccagcagtagcaacagcaacagtggcagccacagcagcagccctgctgggcctgtgtcctttcccccaccaccctatctggccagaagtatagacccccttccccggcctcccagcccagcacagaacccccaggacccacctcttgtacccctgactcttgccctgcctccagcccctccttcctcctgccaccaaaatacctcaggaagcttcaggcgcccggagagcccccggcccagggtctccttcccaaagacccccgaggtggggccggggccacccccaggccccctgagtaaagccccccagcctgtgccgcccggggttggggagctgcctgcccgaggccctcgactctttgattttccccccactccgctggaggaccagtttgaggagccagccgaattcaagatcctacctgatgggctggccaacatcatgaagatgctggacgaatccattcgcaaggaagaggaacagcaacaacacgaagcaggcgtggccccccaacccccgctgaaggagccctttgcatctctgcagtctcctttccccaccgacacagcccccaccactactgctcctgctgtcgccgtcaccaccaccaccaccaccaccaccaccaccacggccacccaggaagaggagaagaagccaccaccagccctaccaccaccaccgcctctagccaagttccctccaccctctcagccacagccaccaccacccccaccccccagcccggccagcctgctcaaatccttggcctccgtgctggagggacaaaagtactgttatcgggggactggagcagctgtttccacccggcctgggcccttgcccaccactcagtattcccctggccccccatcaggtgctaccgccctgccgcccacctcagcggcccctagcgcccagggctccccacagccctctgcttcctcgtcatctcagttctctacctcaggcgggccctgggcccgggagcgcagggcgggcgaagagccagtcccgggccccatgacccccacccaaccgcccccacccctatctctgccccctgctcgctctgagtctgaggtgctagaagagatcagccgggcttgcgagacccttgtggagcgggtgggccggagtgccactgacccagccgacccagtggacacagcagagccagcggacagtgggactgagcgactgctgccccccgcacaggccaaggaggaggctggcggggtggcggcagtgtcaggcagctgtaagcggcgacagaaggagcatcagaaggagcatcggcggcacaggcgggcctgtaaggacagtgtgggtcgtcggccccgtgagggcagggcaaaggccaaggccaaggtccccaaagaaaagagccgccgggtgctggggaacctggacctgcagagcgaggagatccagggtcgtgagaagtcccggcccgatcttggcggggcctccaaggccaagccacccacagctccagcccctccatcagctcctgcaccttctgcccagcccacacccccgtcagcctctgtccctggaaagaaggctcgggaggaagccccagggccaccgggtgtcagccgggccgacatgctgaagctgcgctcacttagtgaggggccccccaaggagctgaagatccggctcatcaaggtagagagtggtgacaaggagacctttatcgcctctgaggtggaagagcggcggctgcgcatggcagacctcaccatcagccactgtgctgctgacgtcgtgcgcgccagcaggtgagtcggctgcctgcttgcttgtcccggagacaggctcccttcccccatcaccctgatgtttctgtcttcattccactgtcctcccgcaggaatgccaaggtgaaagggaagtttcgagagtcctacctttcccctgcccagtctgtgaaaccgaagatcaacactgaggagaagctgccccgggaaaaactcaacccccctacacccagcatctatgtatgtgtgccacttggcctcagaaccacccctgccagagggttctaagacagtgttggggactgctggggtgctctgagcctgggccagggctctgaccccagctctcctggtcatgtctcagctggagagcaaacgggatgccttctcacctgtcctgctgcagttctgtacagaccctcgaaatcccatcacagtgatccggggcctggcgggctccctgcggctcagtgagtatggggggcagaaagtgttagggagggctacaagggtctggggcatgtaggaccctctgagaaatcccacacttgaagactcatgacagtggccgtgaggagtccactgagtgatgggtctgctggccttgggctcttctcccatctgtctgtctccagcatttggcaagggagaaggggccatagtcagggcctgattagtcatttctgaattttttggtgattaaggaagagaataatacagattttagaaaacccctgaaaatctgtgatgttggggctctctctcagtcttttattgcgcagaatttcaaacacatacaaaattagagaaagctgtatagaaatacaaaggtcaatcttgtctcctttatacctgtatgttctcccttccccacactgagttatttgaagcacatttcaggctttcacttgactgaatctttaatctttaattggatccaatggtaactcaaagaagctgctgttttgactagactccaaatggggaaaaaagaagctgccattcattgagcacctactatgtgtctgtcaggtgcggtgcacatggccacgcacacatctgggaacactggtctaggggctgagtccttgagcagctgcaggagaaagagggctggtgaggatgcagatagaggccagcactcccagcttcctgtggggctagggctcctgcctatttcttctgggctgagctctgctaaacctatgaccaccctgtcagagccagaggagtaggaagggaaagggtcgattgggtcctcggtccctatcctctgcctctgccccgacaccctgctcggccctcccttccagacttgggcctcttctccaccaagaccctggtggaagcgagtggcgaacacaccgtggaagttcgcacccaggtgcagcagccctcagatgagaactgggatctgacaggcactcggcagatctggccttgtgagagctcccgttcccacaccaccattgccaagtacgcacagtaccaggcctcatccttccaggagtctctgcaggtgagatgagaacgtggccagaggcaggtcctgggacggggctgcggtgggagggctctcgaaaggtctctgacccaggcctgcctaccctctggctgaacaggaggagaaggagagtgaggatgaggagtcagaggagccagacagcaccactggaacccctcctaggtactgtgcaggtgtgccccttctgttcctgcttccttcccctccctctgctctccaccaacctgtgctcttcgccccagcagcagcgcaccagacccgaagaaccatcacatcatcaagtttggcaccaacatcgacttgtctgatgctaagcggtcagtggggctgaggccagggaagttggggcaggagtgctgctaggacctcgtggcgggggcggggtgtagcctctcgtcgcacttccgcaccgcaggtggaagccccagctgcaggagctgctgaagctgcccgccttcatgcgggtaacatccacgggcaacatgctgagccacgtgggccacaccatcctgggcatgaacacggtgcagctgtacatgaaggtgcccggcagccgaacgccaggtgcgctccacgcctgtgcgcgctgatgctggaagcgcgagaggaggggctggcggcggcgctcagccgtcagccaatgagggcagagggcggggctatcggggatcgcagttccgacctggccagccatgccgttctctgtcgacccctgcaggccaccaggagaataacaacttctgctccgtcaacatcaacattggcccaggcgactgcgagtggttcgcggtgcacgagcactactgggagaccatcagcgctttctgtgatcggtgcgtgccgtcctgcgcaagtcagactgccgcgtccccgccctcggtccccagttcccacctgacctgtggccaccccgcaggcacggcgtggactacttgacgggttcctggtggccaatcctggatgatctctatgcatccaatattcctgtgtaccgcttcgtgcagcgacccggagacctcgtgtggattaatgcggggactgtgcactgggtgcaggccaccggctggtgcaacaacattgcctggaacgtggggcccctcaccggtgagagggtggggcaggtgttggcgtggtgtggcgcctcagcggcaagggcctgggaggctggggcttggagagccgccagcagtgagggaaggggcttgggcctaggtgtctgggggctgtttgagagtcctgttgtgatcgcctttggcccgcagcctatcagtaccagctggccctggaacgatacgagtggaatgaggtgaagaacgtcaaatccatcgtgcccatgattcacgtgtcatggaacgtggctcgcacggtcaaaatcagcgaccccgacttgttcaagatgatcaagtgaggaccctatttgggtgggagcccacctccactgactggtcccttttcttgttcttcctgtctgactccaccccatttttacctctctccatccttgtctgcctgtgccccgagtgttactgtgttggggaggctaactaggtccttgctgtcatgaccttttctagtggtccaaatagacaaaagccacaggaaacttcgcctataacagatgcccaggacagaggatgtgacctagacatgaagcggggaggcccctaggggagggccctggggctgcccacccctctgcccttgctccagccctgcctcaggcctcctccttgccggtggtctcaacacaaccccactgctccccaggttctgcctgctgcagtccatgaagcactgccaggtgcaacgcgagagcctggtgcgggcagggaagaaaatcgcttaccagggccgtgtcaaggacgagccagcctactactgcaacgagtgcgatgtgagtgggccggctctgctgctctccctgagtgtccacagtggccctccctccccctgactgcactgtcctccctgccccaggtggaggtgtttaacatcctgttcgtgacaagtgagaatggcagccgcaacacgtacctggtacactgcgagggctgtgcccggcgccgcagcgcaggcctgcagggcgtggtggtgctggagcagtaccgcactgaggagctggctcaggcctacgacgccttcacgctggtgagggcccggcgggcgcgcgggcagcggaggagggcactggggcaggctgcagggacgggcttcgggagcccggccgcgcctttccctgagcccccgccggctttctccccccaggccccagccagcacgtcgcgatgaggccggacgccccgcccgcctgcctgcccgcgcaaggcgccgcggggccaccagcacatgcctgggctggacctaggtcccgcctgtggccgagaagggggtcgggcccagcccttccaccccattggcagctcccctcacttaatttattaagaaaaactttttttttttttttagcaaatatgaggaaaaaaggaaaaaaaatgggagacgggggagggggctggcagcccctcgcccaccagcgcctcccctcaccgactttggcctttttagcaacagacacaaggaccaggctccggcggcggcgggggtcacatacgggttccctcaccctgccagccgcccgcccgcccggcgcagatgcacgcggctcgtgtatgtacatagacgttacggcagccgaggtttttaatgagattctttctatgggctttacccctcccccggaacctccttttttacttccaatgctagctgtgacccctgtacatgtctctttattcacttggttatgatttgtattttttgttcttttcttgtttttttgtttttaatttataacagtcccactcacctctatttattcatttttgggaaaacccgacctcccacacccccaagccatcctgcccgcccctccagggaccgcccgtcgccgggctctccccgcgccccagtgtgtgtccgggcccggcccgaccgtctccacccgtccgcccgcggctccagccgggttctcatggtgctcaaacccgctcccctcccctacgtcctgcactttctcggaccagtccccccactcccgacccgaccccagccccacctgagggtgagcaactcctgtactgtaggggaagaagtgggaactgaaatggtattttgtaaaaaaaataaataaaataaaaaaattaaaggttttaaagaaagaactatgaggaaaaggaaccccgtccttcccagccccggccaactttaaaaaacacagaccttcacccccacccccttttctttttaagtgtgaaacaacccagggccagggcctcactggggcagggacaccccggggtgagtttctctggggctttattttcgttttgttggttgttttttctccacgctggggctgcggaggggtggggggtttacagtcccgcaccctcgcactgcactgtctctctgccccaggggcagaggggtcttcccaaccctacccctattttcggtgatttttgtgtgagaatattaatattaaaaataaacggagaaaaaaaatcctgtttcgctaacggctggtggtagcaggttgagtaccgggagggctgcaagaccgtgattgatggggaggactgcgcagaccctggcgagggtgagcccctccccggaggcgcctgtggaatgtccagggctctggtccgctcctcgggatggggggtgcctaatcctagagccgcattccaggataaggggggtggggagaggctgggccgggggaggggcaggaaagagggctataagggcagcggcccaggcgggcgggatccaggcgggccatggcggatgtccccggggcacagcgagcggttcctggtgacggcccagagccccgggaccccctggactgttgggcctgcgctgttcttgtaacagcccagaatctgctggtggctgccttcaatcttctcctgctggtgctggtgctagggaccatcttgctacccgctgtcaccatgctgggcttcggcttcctctgccactctcaggtgagcgtgcgccccggggtgtgcgtgtgagtgtgagtgttggtgtgtggtgatgctggcggtggggtctatgggccacaacttcaacccgcctgggctgtttccaccccgtgcacagtatcgcctggtcggcttgggcctgacgcctcttctcccacagttcctgcgctcccaggcacccccttgcaccgcgcacctgcgggaccccggtttcacggccctactggtcaccggattcctgctcctcgtgccgctgctcgtgcttgctctggccagctaccgccgcctctgcctgcgcctccgcctagccgattgcctcgtgccctacagccgagccctttatcggcgtcggcgcgccccgcagccgcggcaaatccgggcctcaccagggtcccaggccgttcccacatcaggaaaggtctgggtctaatgaccctcgagtcaagaacaaccctgacggctgccctccctcttattcggcccaaggacttgaagcccggcatcttccgacctgccctgcccccacccctgcctgagcggagtcctagcatccccttgggagcagcagcgtcagtggacccagtgctgagaaaagcccccacatcccggaaaacccactttcctttcacgacccacatctcaatcctgaacatctaggctggaacctgcacacctccccctcagctccgtcgtgaatgggacaacaatctcgtgccctcgttttatggtgcagcttctctagtatttctggggctggggggcggggctggaggggaaggagtgtccacgcatcaataaagatttaacgaactgaacgcgctctgcgaacagaggcgtggcacaagtactatcacccctgccctgtgccgaggaacaggaaacatgtgccagggctacaaatgagcagagaggagcatccttgagccccctggccttatcgcttttgtccgttcttcctggccagacctcagagatctgttcctgaccccaggcacctccccctcaatagagtggaggggcccagcctcggccgcctgccgctgctccccttggggacctgagcccgttctctgaccccagcttagaggaactcggtgttgccaggccggggtgggaaacaatgggccttccggagcaggatgacaccccctcccgccacaattctggagcagcagccgtgggagggaagatgcaggggcccaccctggggcctgttggtccgtcattcagccctgccccccatctctacccctgaacttgagagaacctttggcacccctggacatcttggttgggagaggagggttgagggtgctcccgacttcagatgagccctttcctctagggatggggtgtgctatcctgcaccggcatcccagctacacacagacacaggcccattcggtcataagtttaatgaagtctgaaaggtaagcgccatcgtggtcagagatacggaggcccggtcagactctccctctgcacctcaatggaaacgatgtggtgtccgggtaccatggccaggcccagcacacggggctccccggcagagaaggaatctggaaagaaggatcagagcatcaggaaagtaggccagaatcagtcccgcccctctgagccacgaaaacgagccccagaaaacaagggttgcagccaggcccttaaggggaaatgccttgcgtaaggttccgccacattaccaggcgggtgtgcattccccgggcactgacccgacggcttgaggaactcctgcgccgagcccaggatgacattgcagtcacggtcagtgcagaggaagcagccgaccagtgtccgtccatctgtcatgcgaatgcgcatagtcttgttgagcagcgcctctagctgctgtcgggcgcgctcagccgccgagtcctcgcgctctccgtccgaatcctgcgcggggtgtaacaagcgctcagaccgcgcagcccaggctgcccgcccgcggaaccacagctcccggcagcccgcggggcactcacacaaagcccagaggctgccgggagctgcagttccccaccccctccatcttgctgcttgactgcccctcagtcccagaaccagagcccgtgctaaccccagcactggagctgctctgacgccgactgcaacagccattctcttctcgtagcagcatggtcggtccagctccggccatttgcccggaggcctcctctgggcctttcaacttcctaagcacctttcaggttgggtggtccgagatctcgcgagcgctcccgacctctttcctttcgcgagatcccctctcctccccctcctagtctcctcggcaacggcacagatctcgcgagcttctcctacttctctagcgctgtggctcactgaagcgtactacgccggatgtcttaagatatcgcgagacctttacctctggtttcttacacatcctttagaaactggaatttagcgagaatacattctttcatactgcctcctcccttgtttttctgtctcagagagatagtctgtcctaaatatcccatgtagcccaggccactgaattaaaacggagcgtattcgttctctgccccaccccgcaactcctgaaagcggcgcaactcaattacttgatccttatatgccccacgcgggactcatactacgtttcccgtgaacacgtgcagtccaaaccccgcccctgatatttatctcagtggacggtggccggaaaaggacaatggtttccatgtcagcggataaacgctctcccctcggctcccggacgcgacggaggtcgtagtagtagtgagtacgtgctgaggagcaaaggagtaaccaagagatccagtgaccgacagagcaagagccatgccgcgccggggcctggtggctgggccagacttggagtattttcagcgtcgctatttcacgccggcggaggtggcccaacataacaggcccgaagacctctgggtatcttacctgggacgcgtgtacgacctaacgtcattggcacaggaatacaagggtaagggccacacgttgggccggggccggagtgtgtgtgtgtgcacgcgcgcgtttgcctggttctcgaagggctggcattgacagtggctgtgctgctcttttcaagggaacctgctgctgaaacccatcgtggaagttgcaggccaggatatcagccactggtttgatccaaagaccagagacgtgagttatgctggaacctgggattgtgggtagaggaaatggagagcggggatgggaaggaaaggcggaggctagccagagcctaatggctgctctgacaccctcgccccaaaccctcctttaaagatccgcaagcacatagatccgctgaccggctgcctgaggtactgcaccccgcggggccgctttgtgcacgttccgcctcagctgccctgttcggactgggccaacgattttgggaagccctggtggcaggggtcgtattatgaggtggggcggctgtctgccaagacccggagcatccgcatcattaacacgctcacgtcgcaggagcacacactggaggtgagaactggtgacaaggagcaggttagaaggaatggggaatcccagcaaatctccaggccgatcttcagggcaacattttttccataaccggtgggagtgtattttctgtcctttacattgaggcaactgaggaaagcacagcacctaggtccccagggttgggaattctaggagtgtctgggtcacagggggacaagagactcctttataagcctgggaacagcagttcatgtatcttagtgatggtggtccttcgaagctcttacacgccgttttggacagcaattggactttctttttaatctactctgttgcatggatatagtgaggggacagttgaccctttatggccatccggtagttagaagtggctgccattaagatctgtaggactttagggtctgctcattgcatgctggagtttcagcttttttttcccggggccgtagagtacctgaagctgctatctgccaagggaggcactttgatcccagcgtgtgtatatgtatactccatccagaattctgggggtggggtgcttctgtgttctccaggtgggggttctggagtccatatgggaaatcctacaccgctatctcccctataactcacatgctgccagctacacgtggaaatatgaagggaagaacctgaacatggattttaccctggaagagaatgggatccgggatgaggaggaagaatttgactatctcagtatggacggtacacttcacacacctgcaatacttctgtacttcaatgatgatctcacggagttgtaggcaaggagatgtacactcgtgtagactcaagacgtatttcgagtttggctttttctgtgccttgaggaaaagtggtggggccgaggggtgcctggacccagatctccactcctctccaggagctagcctgtgcccttctgaagtgtaaaggccctattccctgccttcattacagtttgctctgagaaaattagtgaattaatctttgggaatgatacaagaagatcaagtaccttggtttagggagatgtagaagaggatagtcagagttcaggcagaactgtttgatagttaagagagagtagttctacaggggtgagggatggaaggacttttttggcaatgatggaaatgagatgtctgcaggaagatgggatttacaaagaaataggaaatgtttatcattgaccatacaaagctggcttatcttacttgtagaagagtgtttggcagctgaaacccaagggaaagaaaggaagtgcgtcattataggcaattcaggctagatattatactaggtacttcatataccctcttttttttttttgcccccaacaaagagaaggggtcttgctctgtcacccagtctggagtgcagtggcaaaatcatggctcactgcagcctggagctcctgggcacaagtgatcctcccatctctgccttgagtagctgggacttcaggtgcacgccacaatgcctaattttttaattttttgtagacacagggtctcgctgtgttgcccaggctggtttcaacctcctggcctcaagtgatcctcttgcctcagcctcccaaatagcctcttcaagacaactaccccataaggtggattaccattactatgttacagataagtccttcgaaactttggaaagtttaatagctcaaagccacactaggtagtaaccactagagccagaatgcaaattcaagtctgcccaactccaaagtccatgttctctcaatataaagggaccatctcaatgtctaatctcatgttaacatttgtagccactgctctcagcaagtatttgggatgtggctttgtcctaggatccctgcacaataggaaattgtggtcctattgtatagtttgcagttattgtctctggaagggagtttgcagagttctcctgtggcgaagaggaggcaaggaaggctaagtgtcagttaagcaatagctattggggctacttctttgttaatcccataccccagatttctctcctgaccttttggggcaaagaggtgggtatttactaacttgaaggaaaactagagtggggaaaaggccggcaaattagtgacactttggcgagggagaaaaaggaggcagtttgccacttggagaagatgaggaagacagggttgcaagacggtgactccaaaagagggagctcgacaggggtaatgtaaacagagatgctaactaagtcagaaaactctcctggtgaccaaaagagaaccactattgggggtaatggctagatttggtctcctttaacttaaggaggggagatttgagaatgacagacagttgaacttcctggcagcagcaagcaaaaaacaaatcaggaagagtttagtgtgtcttctggcaggggacaccagggcccagcacaggagaaggtggcccctgtgagatactggtgggctatataggcattttctgaggggctttgggaggcatgaacaaaggtggaaacattgctgttggcttcggcagtatctgaatttactgtgagatggagggtttaaatctaaccccatggaatgcaggagtccatgaattatctaaatcgatcattttgatctttaatcaactctgcaattatgtgtaccttgtttgctcaattaaaccctgaactatttgagaatgaaagctatgctgttcctctagtgcaagcctcagggcctgtcctgtgcctacaggatgtccccattctgccaaaacctgtccctcttccagagactcctacttcaatgtctcttgctagaaacacatccctttcctcacacatccagtcactcatcaagtgtaatctgtctcctaaatatctctggaacctatcttcttttctccaagttaccatcacctcttgtctaaactgctacggaaacttcctaacctgttctcccatttccacttctgacttccatgctgcaatgagagtcagctatgaaaaacaaacctaaacatcgaactttccttagcttcttcagtggcttccaactgcttttggaataaagtcctaaattcaaagatcttgtataaatcaggctcatctcgcaacacccctctttgttctctatggcctagacacactggctttcagttcattacatgtcttgcctcagaccctcacacactgtcctctctgcctgcaacactcttcctttcactttccacctagctgatcctaaatgttccttcctcagggaggtcttttctgatttcttggtgggtcaagactttctgataaatcagttagcaccatgcattttccagagtttttattacaattgtaaaattatggctgtaataggctggctgcgctgctagattgtaagctcacgagggcagagatcttgttcacatcttgctcactgctatattctcattgctgagcacacagttgcagctcaataaattttgaatgaactccaatgttaagtgaactcatccgtctatacctagtgggggggatgttgtgtcctagtaggcaaggaaggaccaagaaataggatgtctggttcctgtgctatagtctctatccataggattcactttccttgcttccccaatatccaaaaccaaaagttattccatagagggtctctggccaggtgcagtgactcacgcctgtaatcccagaactttgggaggccgaggcatggggatcacctgaggtcaggagttcaagaccagcctggccaacctggcaaaagcctgtttctactaaaaatccaaaaaattagccgggcgtggtggcacacacctataatcccagctacttgggaggctgaggcaggagaatcgcttgaacccgggagatggaggttgcattgagctgagatagtgccattgcactccagcctgggcaacaagaacgaaactccatctaaaaaaaaaaaaaaaaaagttaaaaaaaaaaaagagggtctcaccagatttttgggggccaatccatctgtcatttccccatatggccaccaggtggctgtaattacctatagagtcagggagacaagcctggagggaaaacccttccaaagttaggatgggaaggtggcctttggagatttataagggggagggaaggacaagaaaacaaggaaaaaccacatggccaccgttctattagcattaggtttatgcctgcttttttttctctcacaagcacatggcaggaaaggagtgcagttaggaattcatgggctagaacaaaaaggaggtcctgattacaggtatgggagtgtatggggcaaagtatggagctgacaaagggataaagacatcacaaatttttaaaataatagaatgcattcacttattaatacttaaaaaaaatctttccagtaggcactgctttgttctctaaatagccaagtggatatttgcatgaggagtatgtaaataatgctttagcctaaaacccagaaagcaaacagaacatgagtgtagggtccaagtcctcttgtggtaatctcttttgtgttagagggtggtgggtgaaggatggaatgctgaagggaaggctgccgtcctcagtgaatcacagcagcttcaaaggactcaactggcaagatttcccacaggtgaggtccctacatgcccacattactgggggtcataaagaggcatatgttccttgtaggaagcttgcctgctcactgggataaagcatgcacacatgaaaagataaatgaacatagtacatgataaaggcttaagttatggtatagaaaagtttctacccttacagcaagtcacaggtggattactaacctggccatcctgaaactgtttctaaatactctgtgtgtgtgtgtctgtggatgtgtattatttttggaaaatggtgctataatttccatcagattctccaaatagcccaaccccctactcctactcctgaaatagcacgcacacacacacatacacaacaatactttaaacagcctcaaaagtaaaatatcaaaagttataatacaatgtggtcccaatattctggcatctgtctcaatggtctgcctcagcctgtggcagaaccatggcaacccatggcagaaattcctaaagctctaacctttggggctaaatttatgacgagtctcaagtgttttactactgtaccaaatgttaatctggctgtaccttggagctgagtaaagggatccatcatttggtcttgatactataacatccaatcatacatcacgataaggttaatgcatccagcaccacagctaagtttagggaggccacatggatgggctgctgttgggagaacagccacttgatcatgggtcagtagagtacacggtttggctgtaagaatgcacacagaattagaaacctgactgatctttatcctggaagccaaagattaaggattcaaaaatacaaatggatatgcaccccaagtactaggtattctaggcacaccggaagcactaaaaagaaaaacccaaaaagctggtgaatgaataagtgaagtgaatccatcaaagtgggaatgggagtaaaggcttaagtgcagtggtgtgatcatagctcactgtaacctcaaactcccgagctcagacaatgctcctgcctcagagtagcaccaccatacctggctaattctttatttttttgtagagacagggtcttcctatgttgcccaagccggtctcaaactcctcgcctcaagcaatcctcctgcctaggcctcccaaagtgttgggattataagtatgagtcaccgtgcctggccaatattttaaataattgtgtgcctggactgggtgtggcagctcacgcctgtaatcccagcactttgggaggcagaaggatcacttgaggccaggagttcaagataagcctggccaacacagtgaaaccctgtctttactaaaaatacaaaaattagccaggtgtggtggcaagtgcctataatctcagctactcgggaggctgaggcaaaatggcttcaaaccaggaggcggaggctgcagtgagccaagatcacgccactgcactccagcctgggcaacagagtgagactccatctcaaaaaaaaaaaaaaaaattatgtgcatgaagcaaagtttgtgttaggtacttgtgtgtagaattttctacttgtggtatcatgtaggcatgtaaaagtttccgatttaggagcattttgggtgtttgattagggatgctcaacctgtacatacacatacctatatataaacatattatgaatagagtgaaagtactataaagacacacagaatcacgagagcgatggctgaatgatcagaggcatgtctgaggagatgctcacatgactcatctgtattacctgtagagctgcatttaccaacattaatcctcccaacaaacttaaggcataggtacgatttttatttatactgaaaaacaacactgaagcagagagagattaagtaacttgccaaaagtcatacaactaatgagtaccaaggtagtcatagcccatccaactaacataccgcctccctgcatgtcaaacataggatgctattctagttacctaccactgctgtattttgccaatgaatctgcaatatgggtagggctcagcagggacagctcacttctactcccaaaggggtggactgtggggagctggaggatccactttcaagatggctgtctcacatagctctcaatgctatcagtttttctccacatgggcctctacacagggcagtttgggcttcctcacagcatcccaagagaaccaagaggaagctgaatcatatgacctagcctcaattccaagggaagggaactagctcccacctctcaccgggaagagtctcggaattacactgtaagaagaacatgtgggatgtgagacataattgtgggcatatttagaaaatacaatccaccagagatgcactggaggtaaaaggggggtatccagcccagtctagggtggagtggaggggtggtctttgaagggttgtgtgtaggggagacagggcattgatacttgagcctttcttgaaagcctaggttggaatcttggccctatcatttattcaattcattaaaatgatactgagcatctgtcaggcacagtcctggaaactgtgaatacaaaaattaatgacacagttcctgccctctaggagcttacagtttaatgggagactcacggaagtttgtgattctcttaatttgtcatcctgcttccttatttacacagtagccatggggaactttttttttttttttttttttgagacggagtctcgctctgttgcccaggctggagtgcagcggcacgatctcggctcactgcaagctccgcctcccgggttcacgccattctcctgcctcagcctcccgagtagctgggactacagatgcccgccaccaagcccggctaatttttttttttttttttttttttttttggtatttttagtagagacggggttttaccgtgttagccaggatggtcttgatctcctgacctcgtgatccgcccgcctcggcctcccagagtgctggaattacaggtgtgagccattgcgcccggccgccacggggaacttttaaagttcccatgttaaaagtcttcaaaggcaacctacttctcttaagatgaacttagaaacccttaccatggtccagaaggtaagatttggctctttcaggctcttctttgtctcccacgttggcctttcagtttctgaaatgccccccaagctttgcatcagagccttcctacatgctgttcctctgtgtggaacaatccacccaccactcttcagttggccacctggctccttaaagttgcttaaatgacactttatctgatacctccagttatgtcaagtcccttaacacgccctccccagggtgttctgaaatgccataattataattaaaatatttagtgtaattcactgtttaatgtccattttcttcccttcttagactgtaagtaccatgggggcaggggccacagctctcatttatgaaatactcagccctagcccagtgcccagcccagagcagtcactcaataaatacagaatgaacaaatatttggtgaatgctacaaaagagctaagtatgaaacacacatcaggagaacctaacccagttcggggggaccaagccttctggggaagtatcatctcaagctaagatttgaaggacaaggaggagtcagtcaagtggggaggacaagggataggtggaggagagaatggttcctgcacaggataagtagcaaatgcaaacgtagattggagagtttggagagctcggaggcagaaggaactgtagcatggtaaagctaagaggaaagcgggaggcgggggagggaagccaatgagagacgctgagccagaccaaatcatagaaggctttgtaaaccaggttaagttttatttttttttaattgagacataattcacataccataatattcacccttttatagtgtacagagttaagtgttttatgttttgttttgtttttgagatggagtcttgctcttgttgcccaggctggagtgcaatggcatgatctcggctcactgcaaccttcgcctcccaggtttaagcaattctcctgcctcagcctcccgagtagctgggattacaggcgtgcaccaccacacccggctaatttttgtatttttagtagagacggggtttcaccatgttggccaggctggtcttgaactcctgacaatccacccgtgtgggcctcccacagtgctgggattacaggtgtgagccactgtacctggcccagagttaagggttttatagagagaatcacatgatcagatttgcattttcaaaaggtgacttgactacaatgtcaagagagaaggaaatgagggagagaaagtggagacagagagacctgccctaatgcagtagtccaggtgagatccaaaggcagccagaactaggttagtggcagtggagatcggagatgaaatgaagagagaattgcaggacttgataatttgggtaggggtctaaggcaaagggaggagtcaaggatgacacccgtgtctggcctggatgactaggaggatggtgagtccactggcagaaaaaggaactgctggaagaggactttgggaaggaaagtgatgaatttttagttagctgtatgaggtaactcgggcaggcaggcacatgtccagatcttgttggatatataggactggatcctgaaagacagctctgggctagagttataggtgtgggaattattggcagatagcagctgtagccagtcaaggatcagatccccttaaggacgaagtgcaatctacagaggtttggggaggagaaaaggacaccacaaaggaagagctagagggtgaaagaggccaagcaggaaatgttgccacagaagccaaagagagagcacagaagagaggggagcggccaacagtataaagtgctgcacagaggtcacgtaagatgaagacctgagcgaccatggattcagcaaacagcaggtcatggtggctttgttagagaagccaggctgcagttggacaaggtatgcatgggatattcttagaagaaatctaactgcagaaaggaggagtgttctggctttataaccatgcacagaatatttaaataccttcctttgga

SEQ ID NO: 271 - DNA, 31737 bp, Homo sapiens
aagctttggccagagtcaagattttctgccttgtgggccacgtggtccctttcaaaatgactcaactctgtcgtcatcccaggaaagtagccattgccaggcgcagtggctcatgcctgtaatcccgacactttagaaggccaaggcaggataggatctcttcaggcaaggagttcgaaaccagtatggacaacacagaccctgtctctacaaaaaatcagccgagcgtggtagcccacgcctgtagttccaagctacttgggaggctgaggtgggaggatcaactgagctcaggaggtcaaggctgcagtgagctgtgatcgtgccactgcactccagcctggaagacagagccagaccctgtctcaaaaagaaaaaaagtagctatagatgatggatctatgaatgggtatcactgacagtaagatgtatttatgcacactgaaatttgattttcatataatgtttgtgtttcacgaagtactattcttttttttccaaccattcataaatgtaaatccatgcttagctcatgggccaaatgaaagctgcagtgcccacatattatatgattccattcatataaaaatgttggctggtgcagtggctcacgcttgtaatcccaccactctgggaggccgaggcgggcagatcacctgaggtcaggagttggagaccagcctgaccaacacagtgaaaccctgtctctacaaaaaatacaaaagttagccaacatggagaaaccctgtctctagtaaaaatacaaaattagccgggtgtggtggcaggtgcctgtaatcccagctactcaggaggttgagacaagagaatcgcttgaacccggaggcagaggttgcagtaagccgagatcgcgccattgcactccagcctgggcaacagagccagactccgtctcaaggaaaaaaaaaaaaaaaaaagcctagaacaggcaaatccatagagacaggaagcagattggtggttgccaggggctgggggaggggagtggggagtgactgctgatggggacagggttttctttggcggcgacagaaatgttctgcagccagacagaggtgacattcgcagagcactgaatgtagcaaatgccactgaattgtgcactttaaaatagtgaatttcagctgggcgcagtggctcacgcctgtaatcccagcactttgggaggccgaggctggtggatcacctgaggttgagagttcgagaccaccctgactaacacggtgaaaccccatctctacaaaaaatacaaaagttagccaggtggagtggcgcacgtctgtaatcccagctacttgggaggctgagacagaagaatcacttgaacctgggagatggaggctgcagtgagccgaggtcgcgccactgtactccagcctgggagacagagtgactgtctcaaaaataaataaataaatgaaataaaataaaatggttaatttcaggttatgtgagcttcacctcgataagaacatatatacatatggatataatttacataggaatatgcatagaatgtaaagaattacactattgatattttgatttttttttaagctgcaagccaccatttgccagcctccaattaagataaataaaaatagctcccagagatggaagggttcttctaggaaaaatctttttttttttttttttttttttttgagagagagagagtttcgctcttgttgcccaggctggagtgcaatggcgccatctcggctcactgcaacctccgcctccagggttcaagcgattctcctgtctgctaccttcataaacacatgatgggcaggcattctcatgcccctttgacgaatgagggactgaagttcaaaaagaaaacatcaggccagcgcagtggcccacgcctgtgatcccaacactttgggaggctgaggcaggcggatcatcactgggatcaggagtttgagaccagcctacccaatatggtgaaaccccgtctctattgaaaatataaaaattagctgggcgtggtggcacatgtctgtaatcccagctattcaggagactgaggcgggaaaattgcttgaacctgggaggcagagggttgcagtgagctgagattgcgccactgcactccagcctgggcaacagggcgagactccatctcaaaaaaaaaaaaaaaaagaatatcattcactcaaggtcaacaagtacaagtgccagaatctaaactcagggctccagctgtccatcgcttacctcactgaacagaccaactgggaggattaaatgagaaaatacatccagacaagcctggccaacatggtgagactcccgtctctacttaaaatacaaaaattagccaggtgtagtggcgtgtgcctgtaatcccagctacttgggaggctgaggcaggagaatcacttgaacctgggtggtggaggttgcagtgagccgagatcgtgccacttcactccagcctgggtgacagagtgagacctggtctcaaaaaaaaaaaaaaagaaaatacatccagatcctcagcatagggcctggtatacattaggtgctcagtaagtattgctctctccccctcttctgtcctgtgtgtcaataagagcgaggcagtaatggcctggctggcaagaagatgatgagaggttctgatgggaacccatcagtcatcagcccagtgcaatcccgcatcttccccaagcactcgcgacctatttatgtagtagtaagaaaactccagaggcagggccaggcgtggcggctcaggtctgtaatcccagtgctttgataggcaagggcagaaggatcgcttgagcccaggggtttgaggctgcagtgacctatgatcacaccactatactccagcctgggagacagagcgagaccctgtcaaaacacacacacacacacacacacacacacacaaactccagagacaaccaggcaaatcacaaagtgacctttcctatcagacctcagctccaagcattgcagcgacaaggtggtgacccgagataagaagcgcacttgcagagggtgcctctgcccgtatctctccgcatcctcaagaaacacagaactatcaaacatttttgcaacatgaggagccaagttttgcaacatactgaaaaagggttgtgcaaacttcagcagaaacaccccaattgccccagctgggagtcatcatccagttgctgctgtaatgtgattgtaattcctccagtgttcataatttgtcttggaagctcagctgtattttacatgacgtgttttctgtagaattcctgagtacttgctcttgggatctgagccaagtgcacacaatagctatttggggcaaaacagctggtaaagagaaaggcagcttagaccctgaagaaaagtggaaagaattcaaggttactagaaatgtccagggcccagtaaaagaagattgtaatctctctatgtgcagaaacaggccatatacttcatcagtttcctctccatgctcagctcagcatggagcggaagctcagtatttatttgtggctcagacgaaaaacttcttgtttgcaagtttcctgagcccttgaagacagcctggcaggagacaacaaatgcaaagctgcacacgtaccacttatccaatcccctgttagtgacagacatcaccagtcaatcagtcaatcacagacatgaccaatccatcacagcactgggcctggctacaacctcagaatctgcaccagcacagtgctaaaagcaactattatcaacagatttgaggaaaatattctgcctccttggtctacatttataatgttgagttgttaggagaagataaggggcagcaagaaagagatgacaataagataatcaccatcgaggctgggcactgtggctcatgcctgtaatcccagcactttgggaggcttaggcaggaagatcacttgagcccaggggttcgagaccagcctgggcaacaaagtgagaccctgtctctacaaagattaaaaattagccagccaggccaggcacggtggctcacgcctgtaatcccagcactttgggaggccaaggcgggcagatcacctgaggttgggggctcaagaccagcctgaccaacatggagaaacccagtctgtactaaaaatacaaaattagccgggcatagtggcgcatgcctgtaatcccagctactcgggaggctgaggcaggagaactgcttgaacccaggaggcagaggttgtggtgagcagaggtcgcaccattgcactccagcctgggcaacaagagcaaaactccatctcaaaaattaattaattaattaattaaataaaaattagccagtcgaggtagtgcacacctgtaatcccagctactcaggaggctgaggcgggagtattgcttgagcctggaagttgaaggctgcagtgaactatgatcgcatctctgcattccagcctgggtgaccctgtctccaaaaaacaaatcatcatcaggaaacataaagttcccaacagtggccaggtgtggtggctcacgcctgtaatcccaacactttgggaggcctaggtgagtggatcacctgaggtcaggagttttagaccgagtctccctctgtcacccaggctggagtgcagtggcatgatcttggctccctgcaaccctgcctcccagattcaagtgattctcctgcctcagcctcccaagtagctgggactacagatgtgtgccaccatgcctggctaattttgctttgtttttgagatgaagtctcgctctgctgcccaggacggagtacaatcagctcactgcaacctccaccttccaggttcaagggattctcctgcctcagcctcccaagttcccaagtagttgggattacaggcacctgccaccatccctggctaatttttctatttttagcagagatggagtttcactatgttggtcaggctggtcttgaacctcaggtgatccacccacctcagcctcccaaagtgctgggattacaggcatgagccaccacacccagctaatttttgtatttttagtagagacgaggtttcaccgtgttggccaggctggtttcaaactcctgacctcaaatgatccacccgcctcggcctcccaaagtgctgggattacaggcgtgagccaccgcacccagccaaggcttgcagagctctgagggtaaagtcacctaactagttccaggcagggctgagaatgtgacttcatgcccggtgctctttctccaacatcatcattggctgggacttcacgaggacagatacctgtgcaggcagatgccaaccagatagcaggttcataggacaacagcaggagcgggtctgtgctccaggccccctcccagtgccaagcctctcctgcacagagagattccacagtgcctgagatcccctaaaaggctcattcactcatcttcacaatcagccagcaagtactgttgaacactgacaaatgccatctcatattctcaaaaggaaactgaggctccgagaggttaagtggcttgcctaaggtcacacagctaatgtggcaattaaaattcttctaggtcgggcacggtggctcatgcctgtaataccagcactttgggaagccaaggcaggaggatcacttgaggccagccaggagttaaagaccaatctgggcaacacactgaaacctcatttctcttttttttttttttttttttttgagacagagtctcgctctatcgtccaggctggagcacagtggtgcgatctcggctcactgcaacctccacctcccgggttcaagcaattctctgcctcagcctcctgagtagctgggactataggcgctcaccacaacgcctggctaatttttgtatttttagtagagacaaggtttcaccatgttggccaggctggtcttgaactcctgacctcgagatccacccgcctcagcctcccaaagtgctgggattacaggcgtgagccaacattcccgcttttttcttttcttttttttttttgagacaggttctcactctgtcgcctgggctggagaacagtggcacgaactcagctcactgcagcctctgcctcccgggttcaagcgattctcatgcctcagcctcccgagtagctgggattacaggcacgtgccaccacgaccagctgatttttgtagtttttgtagagacggggtttcaccacggtctcttttcacgctggtcttgaactcccgacctcaggtgatctgcccacctcagcctcccaaagtgctgacattacaggtgtgagccactacacctggcccacaagaccagcccacgagacctcatttctgtaaaataaaatgaaaagttcgtgttctttccatgcactggcagctctctgcattggttctgctggccaggcactctgctgaaatgtttcacgctgccctgggaggtcctcagtgggtggccactgtctttacatcacttttgtttcaacaaatcgggtccacagctgggcccagggggacacagagatgagtcaagggaggcccctgtcttgaggggttcaccgtctggggaggaagccaggcgggagaacagctggttaccacgatgtatgagtttcctgtggtggccgcaacaaaagacatagactgggtggcttccaacaatggaaatgtattccccacagttttggaggccaaaagcccaaaatcaaggcatcagcagggttggttccctctggaggctccgagggagaatcttttttttttttttttttagatggagtctcactctgttgcccaggctggagtgcagtgagtgcaatctcggctcactgcagcctctgccttccaggctcaagcgatcctcccacctcaacctcccgagtaactgggaccacaggtatgcgccaccatgcccagccaatttttgtattttttgtagcgagggggtctcactttgttacccaggctggtctcaaactcctgggctccagtaatactcctgcctcggcctcccaaaatgttggaattacagacgtgagccaccacacccagccatctgagaaagaatctgttcccttggctaggtgcagtggctcaagcctgtaatcccagcactttgggaggctgaggcaggcagatcacttgaggtcagaagctcaaaaccagcctggccaacaggatgaagccccatctctactaaaaatacaaaaattaaccgggcatggtggcatgcacctgtaatcccagctacttgggaggctgaggcacaagaattgtttgaacccaaggggtggaggctgcagtgagccaagatcacgccactgcactccagcctgggctacagagggagactctatctaaaaaaaaaaaaaaagaaacaaaaagaatcttttcccagttttgctgctggtggctccggagatatccctgggcctgtggctgcctcactccaatctctggccatcttcacatgcccttcttctctgtgtttgtgttcctgcgtcctttctctcctaaggactcttgtcgctggatcagggcacaccttaatccaggatggtctcacctcaagacgcttcatgatgtctgcagagaaactctttttgtttttgagacagtctcactctgtcgcccaggctggagtgcaagggtgcgatctcggctcactgcaacctccacctctcggattcaagtgattctcctgcctcagcctcccaagtagctgggactacaggcgcaagccaccgtgcctggctaattttatatttttagtagagacggggtttccatgttagccaggctggtcttgaacacctgacctcaggtgatccacctgcctcggcctcccaaagtgcttggattacaggcgtgagccactgtgcccagccaaagaaactctttctaaataaggtcatagtcacaggtgccagggattgagactcagacatttctttgtggggccactatttaacccattactcatggattgaattactcatggcaagaccctgtctctacaaacaaaaatcagccaggcataatggtgcacatctgtagtcccagctgcttgggaggctgagctgggaggatggcttgagcctaggagtttgaggctacagtgagccatgaccgcgtcactgcactccagcctggatgacagagcaagaccctgtgtcaagataaataaataaataaactatggattattattattattagttaataacaatatattcctctctgctcagtaattgtcacaaatgcaccacactaatgcaagatgataataggagaaaggttggggtggtgcgaggggtgctacctgggaacgccgtgtacttcgtgctcaatttttctgtaaacctaaaactgctgtagaaaataaaagtccagaccaggcgctgtgagtcacgcctcccaaatcccagcactttgggaggccaaggcgggcggatcacttgaggtcaggagtttgagaccagcctggccaacatggtgaaactctgtctctactaaaacaaaacaaacaaacaaacaaaaattagctgggcatggtggcgggtgcctgtaatcccagctacctaggaggctgaggcaggagaatccctggaacccgggaggcggaagctgcagtgagccaagattgagccactgcattccagcctgggcaacagagcaagactctgtctcaaaaataaacaaataaataaagtacgttagttaagggaggttgaaaaaaaagagagagagagagacaggcagagacgacggagcttcacaattggaaatggaaagaaaggaacgctggtcgggggcgcagtgagcgcagaggggaatgtgcttggtgtgtttcaggacccaaacagagacagtgagagaggaggaaggcagagaggtacctcagacaagctgcaggtgccagtgagcaaggctcagaggcccaggggaccaaggtgctctctgacaaactagagggatgctgtggtcagaggtctttttttttttttttttcttttaattagacagagtcttactctgtcaccctgtcacccaggctggagtgcagtggcacggtctcggctcactgcaacctccacctcccaagttcaagcgattctagcctcttcagtagctgggattataggcacacgccaccacgcccggctaatttttgtatttttagtagagacagggtttcaccgtgttgaccaggctagtctccaacttctaaccgcaagtgatctgcccgcctcagccttccaaagtgctgggattacaggtgtgagccactgcgcccagccgacggtcttggccaaagcaaaggaacaaacaaacaaaaacccttcccggcagctgcccaggcatcccatatccttgaggagaaattcctgattcccttaatctttccatcattatcatacggggaaactgaggcccagagaaaggcaattcaattcccaaagcacacaagcaggcccatctcccaagcgctggtagagaattcagtgtcacacaagatgtcacctacttccacaacaaagaaaagagcctgtgtgaactcacaatagccatttggggtaaggtactattcttatctgcatttcgaagattgaggaggcaagcccaaacagccaaagccactggttcaaggtcacacagcgcgtgctcagtggctgaggctgactcgcagccatttcagtggcaactgcagaaagcaagtttgtattcaacttgaagtctccggtgactgggtttggtgggggctgcagaggggaccctgcagagtgcatttctgcagaggctgagagtccaagcttccagggcaggagctgcctgcatccctcaccacctggctccaagttcctccttgggatgctcttcctcccatacccacatggtccccaatgactttttcacattagctcacatttcaccccctgggtgagattcagaatttccccattttctccttcccactccctcatctcacactcactttctagtcccttctactgctccatttttctttttaaacccctatcagtaaggccaggcgcaatggctcacacctgtaatcccagcactttgggaggccgaggcgggtggatcgcctgagcccaggacttcaagaccagcctgggcaacatagtgagaccccgtctctacaaaaaaatacaaaaaaaaaaatttagccaggcatggtggtgtgcaccttgtaatcccagctacttgggaggctaaggcaggaggatctcttgagcgcaggagttcgaggctgcagtgagctgtgattgcactactacactccagactgggcaacagagggagaccctgtctcaaaaaaactcaaatgaataaacctctatccttccctccttcactaaagtggaggtcccctagggcagggatcttgtctatctcttggttactgtgtccccagtgcctacccagggctggcagacagttgtaacaggagtgacagtccctggccagcagggatatggtgtgggggacagaggtggagcattgaagggacccattgggcagcattgtcctctgatgcccccgatgctggagctgtattgggggaatgactgtcatcaccgtcctctgagttacttaattcatttatggaagtcagtaaaggaacccagcctgcctgtgcctgccgcaactccaacttctcccagccacctctgcctcagtttccctgcacttgacgggcttattgaggttggggaggagggggtgggtgtctcaaatgtcaaagatttaatgtgtcttgatgttaccacacaaaagttttgttttgtttgtttttttgagacagtctcctctgtcacccaggctggagtgtagtggtgtgattgtatctcactgcagcctcgacctcctgggctcaagcgatcctcccacctcagcctcccactacacccagctaattttttttattttttaagagatgggggccactgtgttgcccaggctggtcttgaactcctggcctcgagtgatcctcctgtctcagcctcccaaagcggtgggattacagatgtgacccactgcaccaggtctacacaaggtgtttttttttacagggtgatgtgcacacggtgggtccctctgggtggtcccacaacagatgaggggcccagcctcacccatccatgaatcctggagactccagacttcccatccatccagggttctgcagccctctctgaggctggagccaatctccccttccgtcaagggatccggggagaccgccaagcccggtgctcccctgagagtctctgagaggccccgacaccgcccccgctccaggtccccgggatgctcgcgcaggcgggagcccggggcgcccgggggatccctgagcgtcacgccgctgttgtggagcgcgtgttgacaacgtcgccggggagacgggcgggggcggggcccgggagagggggaggcgcggccctggcggcgcgcgaggggccgggctgtcagcgcaaggcccaggccgccgcagtggccacggccgctgccgcccgccggcttatataccgcggctaaatttaggctgcgcccggagctcgtccccatccgggacgcgtttccgccgccgccgctttggcccggcccccgcgcgcgccgcgcctataaggcttgggcgggcccggccgcggcccacagagccgtccccgcccgcccgcgccccgaccagcccggcctcgggcagccactcaccggtgtccccgtccgcgtcctttctccccgggtcccggccatggcgctgagtgaacccatcctgccgtccttctccactttcgccagcccgtgccgcgagcgcggcctgcaggaggtgagggcggcggggacggcggggcggccgggaccgtgggcggcgggctcggggtagtagaacgtgggctgcggggtgacaggacgcgaaggcggggactgcagactcaggagaggaggatgcgggccacggggatcgcggacttagggtggtaaaaggcaagcagcgccccccgagccccgccgcccgctcacgcccattgccctgtcgcccgcagcgctggccgcgcgccgaacccgagtccggcggcaccgacgacgacctcaacagcgtgctggacttcatcctgtccatggggctggatggcctgggcgccgaggccgccccggagccgccgccgccgcccccgccgcctgcgttctattaccccgaacccggcgcgcccccgccctacagcgcccccgcgggtggcctggtgtctgagctgctgcgacccgagctggatgcgccgctggggcccgcactgcacggccgctttctgctggcgccgcccggccgcctggtcaaggccgagccccctgaagcggacggcggcggcggctacggctgcgcccccgggctgacccgtggaccgcgcggcctcaagcgcgagggcgccccgggcccggcggcttcgtgcatgcgaggtcccgggggccgccccccgccgccgcccgacacaccgccgctcagccccgacggccccgcgcgcctgcccgcgcccggtccgcgcgcctccttcccgccgcctttcggtggccctggtttcggcgcgcccgggcccggcctgcattacgcgccgcctgcgcccccagccttcggtctcttcgacgacgcggccgccgccgcggcagccctgggcctggcgccccccgccgcccgcggtctcctcacgccgcctgcgtccccgctggagctgctggaggccaagccaaagcgcggccgccgctcttggccccgcaaacgcaccgccactcacacctgcagctacgcgggctgcggcaagacctacaccaagagttcgcatctgaaggcgcatctgcgcacgcacacaggtgggcggcacgcacgagccaggagcgcaggcggggggacgcgggaggagaggtcggattcccagcgcgcgccagaaaatgaatttaggacctcccttggggcgtggctcagggggatctggcaggtggtgcacgcttaggactccccaggaggcgtggctcgggaggttggttgggggggcacacaggaacactccctaaggaagtgtgatccgagaggttggggtgggggcttgcacgcttaggacgaggggggcctccggaggttgggaagagcacttagaaaacctcctggaggcgtggctagggagacagtctcagaaagttggggagggggagcaggtttaggagccgctgggcacttggctcagaatccccggggctgaggctcaggtagttggggagtaggtgcgcgtttaggaaccccggggagatgctgcgtctcaggaagttggggagggcgctcaggcttgggactcctctggggacaaggctcaggaccttggggagggagtgttcgctgggaaaccttgagagattccgtgtcttagaatgctggagagagggtgcatgcttaggacccgtcggggagcgtggctgacaacagtggggagtggaccttgcgctcctccgaccccctgggggtgaggatccggattgtggggggagttggggatgtagggcaaggatccctcaggggcgcaacactaccgcggggagcgcgtcaaggccctggttagggataggttgcgctcgccggggtagccatacgtgccctgtcctgggaggggaactgacgcttactctcgccccctccctgcaggtgagaagccctaccactgcaactgggacggctgcggctggaagtttgcgcgctcagacgagctcacgcgccactaccgaaagcacacgggccaccggccattccagtgccatctgtgcgatcgtgccttctcgcgctccgatcacctggcgctgcacatgaaacggcacatgtagccgggacgcccccgcccacctgcgcgcggccgtggcgggtcccacgcgccgggcgcggccccctcccaaactgtgactggtatttattggacccagagaaccgggccgggcacagcgtggctacagagggtctccctcgatgacgacgacgacgacgccaccaccccagcccccgtctgtgactgaaggcccggtgggaaaagaccacgatcctccttgacgagttttgtttttcaaaatggtgcaataatttaagtggcatcttctctcccaccgggtctacactagaggatcgaggcttgtgatgccttgtgagaaataagggccttaatttgtactgtctgcggcattttttataatattgtatatagtgactgacaaatattgtattactgtacatagagagacaggtgggcatttttgggctacctggttcgtttttataagattttgctgggttggttttttttttaattaaaaagttttgcatcttttaaaaaaaatcacagcactggtctggttgcttggaactggggccttggggcacttgggaggaggggggagcggagagtttgatggagggcagccccactaaagcatcgtgtgcagtgggtcctgcgtctgccagcaccgggactgccagctgctgtgcctgcctgccaggaacctgtgggtttttctgtaaatttagacactgcattttaggactgagggagggttattttaaggttgttctttgagccataaattgcctctttgccccacagctggggaaagtgctggtcccactgacgtggcctcctctacgttgaaaaaaataaaactacttacctcttcctggaagcctctgaggttttagccaaatttctggagtgccagctctatatttttatttttatttttaaagggggttaacctgctgagtttctggcatgttctgccctttactcgtctcgacatttagcaagtcttttcttaaggggtgagttccccattctgctagcggaaaacagtgaaacctgcattcgagggccatgcatgaagctcttttccagatgaggaaacggaggcccggagaggtagcggcagggtggtggagttgggttgttagcctgctctgtctgcctccaagggtccctgaaccccactggaagggagtggtagctttctacaatgacccacctgttgtgtgcattggaaggctaggagagcctcctcccctgtaggtctcctggtgcaaaaaattcactgcctcaatggtaggaggtgaccagtctggaaacccacctggagagcagaggagacccctaaatcccaccaccccaagtgtctcaggcaaggaggtatctctccccccagatttcacctgccacccctcaccttccccattctcaggggccccgggtaaccatgaccaccaaccattgcacaagtttccagaaagtgaaaatagctcgtaagcagcgcctgctttaaaacactctcaccccgttgcgacagaggctgggatttcctccctccctgcatccttcctcctccccaactacggcagccctggaaacagctgagaggtgtttggtaatccacgaaaagcagaaatacgatttgacaatctgattcattttccgagagtaaatagcctggcctcacttccgctgctgatgaagggtgtgaatgtttttgagcctcctgtaccctctgcgtgcagcttctgcaaaaaccgtcccaagacagaatgttggcccctcgacctggggagatgatccccctttttaaaagctggcctctgcagtgcaggggcagaagaaggactcgcgggtggtttaaaacaatattaagggtctccaggtttccctgttcagcttaaacttagtgatcaagctatttttcttgcttatttgaaaatgtcttccaggtttctcctggaagcttctgagtccagtgaaaggcaaatcgttcacggggctgaagctgtttctgtttcttgcgtgtatgttctgttggagaacagacagaatagaaagtgtgatagttgtacgtttcagtaagagacaccaactcaggcagcgctaggtcataccgactaatccagaaatatcccatcatcatttttttctgcccctttctgacactcaaatgccaatttccatgatcttctgcatctgtgatgctcagtggagagtgacccagtctgggaacatttttggttgtcaactcgggggtgctgctggcatctggtggacagaggtgggtgatgttgctaagcattctgcagtgtacagacagcccccaccacagagaatagcccagctctgaatgtcagcagtgctgaggttgagacatcgcctctggttcctaaaagatcattgctcttatcagcaagaaggtgactctgtgccacgaagcaagctttggtggcaaatgccacccagaaaaaggtacaaagaaaacctcaccctggggccatcttcacctaggattctacaacccaatcccaatgcaagtttttctttctttctttctttctttctttctttctttctttttttttggagacagtctcgctctgttgcccaggctagagtacagtggcacaatctcagctcactgcaacttctgcctcctgggttcaagtaattctcctacctcagcacctcctagtagctggtattacaggcgcgcgccaccaagcccaactaatttttggatttttagtaaagatggggtttcgccatgttggccaggctggtctcgaactcctgacctcaggtgatccacccacctcagcctcccaaagtgctgggattacaggagtgagccaccgcacccaaactctctctctctctctctctttttagagcaggagatttgtggtcactggctgaattacttttcatggctgtgattttcgctatattctttcttttccccaggcaaagttataatcatttgtcgatgctgttttttcccccagttatacatttgtattgtcattttcatggctgcataatattccttttagatatggcaggagttatttatggaaacaagcactgtgggtaaaagggttgaaaagggtgaaggttttattttgtttggtttgagatagggtctcatctgtcacccaggctggagtgcagtggcacaatcactacaatcttgacctcctgggttcaagcaatcctcctgcctcagcctcccgagtagctgggattacaggcatgcatcaccatgcccagctaatttttacatttttttgtacagaggggatctcactatattgcccctcctgggctcaagcaatcctcccgcctcagcctctcaaaatgctgggattaaagatgcagaccaccaagcccagctatggcagggggtgggggagaggtgacagttttgaggggcttattggcatggtgctggggagagatgtaggagctatttttctgctaggcacttcctgtagttctgggggccccagcacccaggcaggctgcagaatgatgtggtgtgaagtgggaggaggaagggggcgttgtcagagggcaagatgtctataggctcacccctgactcagcacccagccctgtcaacacggttgagtcagcacccacgcccggcagccccaggtggagtcccaggaccataggctcaagctgatttgtcaggtgccagggctgggtggctccgattgccccggcctgagctgtgtcagctgtgccagaccagcgagcatcagccttggagctgggcacagcggtggctcatgcctgtaatcccagcactttgggaggccgaggtgtggggatctcttgagccaaggagtttgagaccagcctgggcaacatagagagaccctgtttctgggtgggtggggggcgggggaagagagagagaagagagaaaaaacaaaagacatttggagctgaatcattctccagtgcggggccaccctgtgcactgcagtgttcaacagcatctctggccttcaccgactcaatgccaattaacacccgtcccctggccagacccgggggctcacacctgtaattccagcactttgggagggcaaggcgggtggatcacttgagctcaggagttcgaggccagcctggccaatatggtgaaaccctgtctctacttaaaaaaaaaaaaaattagctgggtgtggtggcaggcgcctataatctctgtcatctcagctacttgggaggctgagtcaggagaatcactggaacctgggaggcggaggttgcactgagctgagatggcgcctgggtgacatagggagagtccatctcaaaaaaaaaaagaaagaaaccctcagatcagccgtgcgactttgcctgcctgtgcctcagtttccttgggtggaaaatgagtttgctgctgtgaaaatgaaatgagacactaaagctcagagcccacccctggggtgtggccagcacagtgagtgtcctctgataaagctggtgtgcctgaattttaaggccccttcctccctctctctccctctccccacaaccctcttcgctcattcattcattcattcacctgttcattcagcagatgctctgtatggcaagcagatatgactcagaatctcaggagtgactctggccgggcgcaatggttcacacctgtaatcccagcactttgggaggccgaggcaggtggatcacctgaggtcaggagttcgagaccagcctggccaacatggtgagaccccgtctctactaaaaacacaaaaattagctgggtatggtggcaggcgcctataatcccagctactcgggaagctgagggacgagaattgcttgaacccgggaggcagaggtttcagtgagctgagatcacaccactgcactccagcctgagagacagagcgagactctgtctcaaaaaaaaaaaaaaaaaaagtgacgtagcctctgggccttgcccagagtcagtgccaaaatgtttgtcgcatgacctaactttgtgctaacggtggaccctgtgactcgagcttgggtgctttcattctgggcaccttcaacaaattatctctttcaacctccccacaagcctgagggttgcctaagcacccccattttctagaggtggaaagtggggttcagagaggggaaggttagctgggggacctggtgcaggtggcagagctgaggcttcaacccaggtctgcctggcctggccaccgcaactcctcctgtgcctagaaacatctgaatgcaccaatgcatcaggtttgccctgtttccctccacacacaggttctaggggttcctggaagccctgctgagttccttctaggcttttgtctaaaaggaactgagaagcccatttgccaggaatatcccagacagggagggacaaggggtcgggaagaggctgggtgaatagggttccctgaggtgccctataagaagttaggaggaggccgggcacagtggctcacgcctgtaatcccagcactttgggaggtcaaggcaggtggatcatttgaggtcaggagttcgagaccagcctggccaacatggtgaaacctcgtctctactaaaaatacaaaaattagcttggagtagtggtgggcacctgtgatcccagctacttgggaggctgaggcaggagaattgcatgaacccgggaggcggaggttgcagtgagccgagatcacaccattgcacactagcctgggcgacagaggaagactccatctcaaaaaaaaaataataataagttaagacgagcctgggggccagacaccatggctcacgcatgtaatcccagcactttgggaggccaaggcaggtggattactggaggtcagaagttcaagatcagcctggccaacatggtgaaaccccatctctactaaaaaaaaaaaaaaaatacagaaattagccgggcgtggtggtgcacacctgtaatcccaggtactcgggaggctaaggcaggagaatcacctgaacccaggaggcagaggttacagtgagccgagattgcaccactgcactccggcctgggcaacagagcaagactctgtttcaaaaaaaaaaaaaaaatgctaaacatggaattgccataggtcccagtgattccattcctaggtatagtcccaagagaaataaaaaccgggacacaaacagatacttgcacacacgtgttcgaggcagcaccatttacatgcgccagacggtggaaacagcccaaatacccatcaactcatgaatcaataaaagtgtggtatatccatatgacccagtggtttttgtgtttgttttttgggataaggtctcgctctgttgcccaggctggagtgcagtggtgcgatcacagctaactgcagcctcgaacccctgggttcaagcaatcctcctgcatcagcctctcgggctggttcttactgggggctcccctgagtgcagagaacaggcccaagctgatgccagttagggaagtcatctctatagttctagaagggatactgagcccaggaggctggagacaggggcctcaccaaccctctgctcgtagcctgagctctttctccagcgtgatttgatctgccccatcaccgtgttcttttctctctcatcccatattttctttctttcattctttctctttattgtgattaaatatacataacataaaattgactgtttttgttttgttttgtttgagacagggtctcactctgttgcccaggctggagtgcagtggtgcgatcacagctcactgcagcctcgacctcctcaggctcacgtgatcctcccgcctcagcctccagagcagctgggactataggagtgtgctactacgcctggctaatttttctattttttgtagagcctgagtctcactgtgttacccaggctggtcgcaaactcctgggctcaaatgaaccatccaccttggcctcccaaaatgctgggattacaagagtgagacattgtgcctggctaaaattcactttttttttttttgtgacagagtcttgctctgtcacccaggctggagtgcagtggcacgatctcggttcactgcaacctcccacctcaagtgattctcctgcctcagcctcccgagtagctgggattacaggcgcacgccagcacagccggctaatttttatattttcagtagagacggggtttcaccatgttggccaatggtctcaaactcctgacctcaggtgatccgccccccttggcctcccaaagtgctaggaatacaggcgtgagccaccacacccagcacaaaattggttatttttaagtgttcagttcagcagcattcacagcattgtgccaccttcaccaccacccatctccagagcttttcccttcttcccaaactgaaactttgatcccattaaacactcacttcccattctccctccccagccactggcccccacccttcttccttctgtctctacaaatttgagcactctgaggacctcctaggagtggaatcatacagtatctgtcctttcctgtagtttatttcactcagcataatgtcttcaagattcatccacgtggtagtgtgtgtcagaatttccttcctttttatgactcagtaatattccattgtgtggaaggaccacattttgtatgtccattcattccttgatgaacacttggtcatttccaccccttggctgctatgaacatgagtgtgcaaatacccattccagcccctgctatcagttttttggggctgtgtccctaacagtggaatggctggatacccttttttactttttactgttagtattttttgagacagagtctcactctctcgcccagcctgcagtgcagtggtgcagtctcagctcactgcaccctctgcctcccgggttcaagtgattctcctgcctcagcctcccaagtaactgggattacaggcgtgcaccacctcacccagctaatttttgtatttttagtagagacgacgtttcaccatgttggccaggctggtctcgaactcctgacctcaagcgatcctcctgcctcggcctcccaaagtgctgagattacaggcgtcagccaacgcgcctggcctgggtatccttttttaaactttattcgtggctgctgataacgctcaaaagagtttttctttccttagcagctcgcctaagagccattgacccaggctgagcatcgtctgcgagcctccctgagagctcagattcacaccagccggcatctgtcgcctcagcctgcaacattctgggcctcgatttcctcttctttgaaatgggggtaacagcgcagagcagtgggagcacggccggtgccctggccttgggggccgcccggaaatcggggttttgcagcagcttgggttgtgcagagaggcagaggctgtcagggagatgaacgggcctgaggtggaggtgccgctcacacccggcacacccgccgcctgctcagcccacagcctgctctgcgcagccagctctgcgcagccagctcccctccccacctaggccccggccatctcaagacagcctcctccggaggggacacagactcctgcacaccagacccagagactcttaggccggcgactaaactgaaaagccctcactctgcagggtggggaaactgaggcccgggtatccaaatcctccggcagacagacgccaaccgacctacatgggtcttggggtcttcctgagccacaaacgcaaatcccacaggaggagctggtccctcaggtggggttcctaccagggacatggcttgccaggatttgaccccgttttaacctagaacagccaggtgtgctggctcatacctgtaatcccagcactttgggaggctgaggtgggaggaccacttgaggctgggagtttgagaccagcctggggaacatagcaagaccccatctcttaaaaaaagagcgtggtagcaggcatggtagcatgcatctatagtcccaactactcaggaggctgaggtgggaagatcacttgggcccaggagtttgaggctgcagtgagctatgattgtgccactgcactctgatatgggtgatagagcaagaccctgcctctaataaataaataattatttttataatttattataaaattataaatgttataaaaattaatttaatttaattaaataaaaaaagcaaggtagctcatgcctgtaattctagcactttgggagaccaaggtgagcagatcacttgaggccaggagttcgagaccagcctggccaacatggtgaaaccctgtctctactaaaaatacaaaaaaaaaaaattaagccgggcgcggtggtgtgcaggtatagtcccagctactcgggtggctgaggtatgagaatcacttgaacccaggagatggaggttgcaatgagccacgatcacgccactgcactccagcctgggtgacagagtgagtccctgtctcaaaataagtaaataaataatatcatctagaacgatgtaaacagaacattgcattgacattttgtcaattgccacaaaattgacattttgtcaatggtttgtcattgcaagccattttgttttttctctccccgccatcccccctcctttttctttaaacatggggagtttataaatccatgagacctaacaagcagctataggacactccacacaacagcaggacacactttcttcttgagggtgcaaggaacattccctgggagaggccaaagaataaatccagtgcattgaaaaggatcgcaattctataaagtatgtcctctgaccacaatggaatgaagtgagaaataagaaacagagaggaatttggcaaacttaagaaatatgtagaaattcaagaacgcacttgtaaagacaaggaggacctactctaagattcatcagaaaatcccagcatttgagaccagcctgcgccacatggtgagaccccatccacagaaaaaatacaaaaaatcgccgggcctggtggcgtgcacctgtaatcctagatactcgggaggctgaggtgggaggatcacttgaaacagggaggtagaggctgcagtgagccgcgatcgcatcactgcactccagcctgggcaacagagtgaggccctgtctcaaaaaaaacgaaaagaaaagaaaaaaagaaaaaggccatgtgtagtggcttacacctgtaatcccagcactttgggaggctgaggcaggtgaatcacctgaggtctggagttcgagaccagcctggccaacatggtgaaaccccatctctactaaaaatacaaaaaaaaaaaagacaacacacacacacacacacacacacacacacacacacacacacacaaaacaaactagctgggcatggtggcaggcacctataatcccagctactcaggaggctgaggtaggagaatcgcttgaacccgggaggcggaggttgcagtgagctgagatcgcatcattgcactccagcctgggcaaaaaagcaacactccacctcaaaaaaaaaaaagacaaaaaaacattctagcagtgggaaggtcctttaggggcctaagctcctgagtggggaccagtccggctttgtgcagggactcagtgcacctggggctctctctgcagatatgagatgtgcatgggctcttctggatgttgccctagtgagttctgagggctcctgtgggctcgtagcttctagagtggatgattcccccaagatcactgtggggaacaccaagagtggctgctccccacagcttcaaggctgccagtggggactccactggaggtccgcttctggggggctgccacgtgtccccagctttagtcaggacccctcccacaacagcatcccctgctcccatccacatctccaggtcctccaactcctgtgacccttccccaatcccacatctttgcacaggctgttcctcatggcaaaaagcccttcctgtgtgtccgtggggcagatgccagtccgccccccaaggcctggctccggcatcacctccactgggaagcctgccctgattcccatagaagcaccccagcctgccccgtgccagcttggacctcacagggtgggagcgccagatctgtggctggctcctccttcccactagactgggcagcagcagagaggggtgctgaatgactcgggggacctggttgacaaggggtcaggaccgtgaaggggacagtggttttactcccctgtcatagtcacagagagcaacacacaaaatccaaggattcctgggatgacagaatttctgacctcaaggccaagatgatgctgggtagagtgtgcagcgtgtagtgtagacggggacttggatccgctggccctggctgcctggagatgctgggtagagcacgtagtatgcagcgtagacagcattcagagtccctcagccctggctgcccctacctctgccccttgcccctggccatggccctgggcgcacgcctggccctctctgagccacagctccctcccaccagggctggtgagaaaagtaaaccgagagtgctgtttcctgccaccctgctgggtgctcagcctccctccacccgcatcctctcgagtgggtagaatcccaactgggggccctctggcagggtccgggagctggcacacgagcaggcactctggctcggccatgcatccgtccatgggccactcgccgagacacgtggctctaaatggacacagtcattcaggaaatagcgcctcgcccaccgaatgccaggcgccactcagcaggctgctgtaactccgcaggctgcctcctgaattgccctccactttcaaccttgaccccaggttggcctttctggggactgtcccaagatcgagagacacacttcacagccaagccctcgtctgcagcctcggagctatgagatgttccagctccagggaaaaaactcaggaatcagaagtctggccagccccatcccactcctcttggctttaatgtaactcagaggcaccgatcctggctcttggggcagaattctccacattcctggtgtgtttccgttgaaccccaaaccgcaaacacatcctgacatctcatttcctcaatgtgccctggtggtgactcgggccaccttgccgggagctcgttttgagtcatacagagatttgtcgaaggaagggtttctcatctcagaagttggaggccgttcccaccaacctccctccctgcatctgtacaagaattgctggcggggctgctattccctgatgcttggatctgagctctcagtgactcgggaggcactggccaggggccctggacaaatctaagctcagttccttatgtcaccactgtcaacctcaggcacgggaaggcggctctcagtctctttcctcctctgtagagctgggctcttagcagctatcttggccgggctctatctcaaatggatggaatctgggctatgcctgacacatagtaggtgctcagtgaaggaatggtgcccattagtgagagagggagacagggctgggcatggtgatgtgcacccgtggtcccagctacttaggaggctgaggcagaaggatccctagaggccaggaggtcgagacagcaatgagctatgattgcaccgttgcactccagcctgggcaacagagcaagaccctgtccttaaaataataatagtaataataatttattgaactcctgacctcaggtgatccacccgcctcggccttccaaagtgctgagattacaagcatgagccactgtgcctggctgaataataatcactaaaaaattaatctaaacataatttctaggctgggtgcggtggctcatgcctgtaatcccagcactttgggaggccaaggcgggcagatcacctgaggtcaggattttgaaaccagcctggccaacatggcgaaaccctgtctctaatttaaaaaaaaaagaaaaaaaaaattagcccggtgtggtggtgcatgcctgtagtcccagctgctggggaggctgagaattgtttgaacccaggaggtggacgttgcagtgagttaagatcatgccactacacttcagcctaggcaacagagagagaccctgtctctaaataaataaatgagagagagagagaaaaaaaatccaaggaaacaagcccattcattctacttaattccgctggtctctgggaggcaggttgggggtggagaaattccatgtttttacagaatcctgacgtcaccagcaactgccccaccaggagctaacttcagcacgggcggagggagggtgtctgcccacgacctgaccttgaactgggcctttcttaaatgtaaatgtgcatctcctttggtgcttttttaagtgggagaggtccctgaaaggttgttgcctggaggaaaagttttggcaattaacttttattattgtttgcttgcttaaagaaactgggggcccagagcagtgagtggcttatgcctgtaatcccagcactctgggaagccgaggcgggcagatcacttgagcccaggacttccagaccagcctggccaacaaaaattagccaggcatggtggagtgcacctgtaatcccagctactcgggaggctgaggcagggggatcacttgaacccgggaggcagaggctgcagtgagctaatattgctccactgcactccaacctgctgggcgacagagtgagactgtctcaaaaaacaattgggatgttcatcaaagcactattcataacagccaaaaagtagaaacaacccaagtgtccattagagaatgaataagaaaactgtgatccatacatacaatggaatattattcagccatgaaaaggaatgaagcactgatccatgctacaatgtggatgagcccccaaaacattctgagtgagagaagccagacgcgaaagcccacatagtgtgagattccactgatacaaaatgcccagaacaggcaaatccagagagacaggaagcagatgagtggctgccaggggctgggggaggggaatggggagtggctgctgatggggacagggtctcctcttgggggatgcaaatgttctggaattagacagaggtgatggttgcacaacattgtgaatgcacgaaatgccactaccgtgtacacttcatggttagttttatgttatgtgaatttcagctcaattttaaggtgtaaaaaaagcaattgagaataagttgcttctgttgtaaaacgttactttttttttcagacggagtcttgctctgtcgcccacgctggagtgcagtggtgcaatctcggctaactgcaacctccgcctcccaggttcaggtgattctcctgcctcggcctccccagcagctggaattaccggcgcccgccaccactcccagctaatttttgtatttttagtagagacgggtttcactgtgttggccagaagggtctcaaatgcctgacctcaagtgatccacccaccttggcctcttaaaatgctgggattacaggcatgagccaccatgcgcagccacattactatttttaatacagttattttgtcaatataacataaagtttggaccgagtatccactgatgaatgaatggataaacaaaatgtggtctatccatctatccagacaatggaatagtattcagtttttaaaaagaaagagattatagggccgggcgcggtggctcacgcttgtaatcccaacactttgggaggccgaggcgggcggatcatgaggtcaggagttcgaaactagcctggccaacatggtgaaacccagtctatactaaaaatacaaaaattagctgggcgtggcggtgcgtgcctgtaatcccagctactcgggaggctgaggcaggagaattgtttgaacccaggaggcggaggttgcagtgagccgagatcacgccattacactccagcctgggcagcagtgcaagactacaattcaaaaaaaaaagaaaagaaaagaaaagaaaaagagaaagattctgacacatacatgctccaacaggaactatcctaagtgaaatacgccagacacaaaaagagaaatactgtatgagtccatgcatcagattcatagagacaggaagtagaatggtgggtgcgaggggctgggggaggaggaaatggggaatgagtatttagtgggggcagagtttcagttttacaagctgacaagagctctgctgcgtaacatgaatggactggggtgagccgtgagggctggagggccctcagacaagagaaaggatgacagttccaaggcttcaaacagatgctctgagagaaccagtcctcagaaaggctgagaatccctggaatttttcctgggctggaagggatctgctctatggcttaaaggtcttggccaagggcctgaagaaccacccatcttccagggcccaggcactccgactcctcaaatttaaatacaggcgctttctacgcatgagtgccaaaccatttccagtaagtctcattgtcagctataaaaataaccactgttgaagcagagacaagctcgtgatgcagccaggcagtgccacagagaggcaatggcatctgtccctgtcaaatggaaagtcccctggccaagcctctgaattcaagtgaacatcttggtcttggatgtgaccatctgaatggtggtcgagaaagtgcttggtccatagaaggcacccaggacactcgagcccccttctctcccatgaccttcgtacaatggcacggaatggagacgcagggctgggacttcccctccaccacaccggtttcctttacaatgagattccattcctataatgaggaataatgtagtagcttagttaatacagacagaactgcccctcagtcggttcttgggtagtggagctagaatatacaggccctgctctaaaagctcaaagcaatccctggacagtaaccatagctttaataatactcatctgggccgggtgcggtggctgaagcctggaatcccagcactttgggaggccgaagcgggcaaatcacaaggtcaggagttcgagaccagcctggccaacatagtgaaagcccatctctactaaaaatacaaaaaaattagctgggcttagtggcgggcacctgtaatcccagctgctcgggaggctgaggcaggagaattgcttgaacccgggaggcggaggttacatgagctgagatcgtgccactgcactacagcccaggtgacacagtgagactccatctaaaataataagaataatacccatctgaatgaataataacaaaaaccagtaccactggctaggaggcggaagtggggttatggggaattgctcaatgggtacagagtgtcaatttcacaaaatgagaaagttctagagatctgttgcagaatggtgtgaatatatttaacactgctgaaccacgcacttgaaagtggtttttttaaaaaaaaagtggttaaagtggagctggatgcagtggcatgcacctgtaggcccagttactccagaggccgaggcgggaggattgcttgagcctaggagtttgaatccagcccgggcaacatagtgacaacctgtctctaaaaaaataaaaaaagaataaaaatttctataaattaaaaataaatttaggccaggaatggtggctcacacctgtaaccccaacactttgggaggatcccttgagctcaggagtttgtgaccagcctgcacaaagtagtgagactctatctctagaaaacatacaaaaattagccaggcgtggtgctgcatgcctatagccccggctattcagaaggctgaaatgggaggatcacttgagcccggggtgcgaaggctgcagtgagccgagatcgcaccactgcactccagcctgggcaacagagtgagaccctgtctcaataaataaacacatacataaaataaaataaatgaataattttttttttcctgagacagagttttgctttttcagccagctggagtgcagtggtgcgatctcggctcactgcaagctccgcctcctgggttcacaccattctcctcagcctcccaagtagctgggactacaggtgcccgccaccacacccggctaattttttgtatttttagtagagatggggtttcaccgtgttagccaggatggtcttgatctcctgacctcatgatccacctgcctcggcctcccaaagtgctgggattacaggtgtgagccaccacacccggctgaataaatttttaaatggttaaaatggtaagtttcatgttttttatcataattaatattttttttttttgagacagagtcttgctctgtcacccaggctggagtgcagtggcacaatctttgctcactgcaacctgcacctcccaggttcaagcgattttcgttcctcagctcccaagcagttgggattacaggtgtgtgccaccacaccccactaattcttgtatttttagtagagacggggtttctccagattggccaggctggtctcaaacttctggcctcaagtgattctcctgcctaggccacccaaagtgctaggattacaggtgtgagccactgagcttggccataattaaaaatttttaattaaaaaaaaaaaaatccagccgggcgcggtggctcacgcctgtaataccagcactttgggaggccaaggcgggtggatcatgaggtcaggagatcgagaccatcctggctaacatggtgaaaccccgtctctactaaaaatacaaaaaattagccaggcatggtggcgggcacctgtagtcccagctactcaggaggctgaggcaggagaatggcgtgaacctgggaggcggagggagcttgcagtaagccgagatcacgccactgcactccagcctgggcaacagagtgagac

SEQ ID NO: 272 - DNA, 1171 bp, Homo sapiens
cctgagcgtctccatggcctgcctgagcccctcgcagctccagaagttccaacaggatggattcctggtgctggaaggattcttgtctgcggaagagtgtgtggccatgcaacaaaggattggcgagatagtggctgaaatggatgttcctctccactgccgcacagaattctccacccaggaagaggagcagcttcgagcccagggcagcacagactatttcttgagcagtggtgacaagattcgattcttctttgagaaaggcgtttttgatgagaaaggaaatttcctggtccctccggagaaatccatcaacaaaattggccacgctctgcacgcccacgaccccgtcttcaagagcatcacacactccttcaaggtgcagcaacctcactttggcggtgaagtctcccctcatcaggacgcctccttcctgtacacggagcccctgggccgggtgctgggcgtgtggatcgcagtggaggatgccacgctggagaacggctgtctctggttcatccctggctcccacaccagtggtgtgtcaagaaggatggtccgggcccctgttggctcagcgcctggtaccagcttccttgggtcagagccagcccgggataacagcctctttgtgcccaccccagtgcagagaggggccctggtcctcatccatggagaagtggtacacaagagcaagcagaacctctctgaccgctcgcgccaggcctacactttccacctcatggaggcctctggcaccacctggagcccggagaactggctccagccaacagctgaactgccctttccccaactgtacacctaaaggctctcgcagggcaggagccctcgcccctcccgggtgaagctgtgggctgtaaacaccagtgccttgctcagcctcctggttgcaacagggaggtcttgtctcccctcctgggctttcctcctgccctgtgggcagcagcctaggctgggtcaggggcttccctaagatcttcacctctctgcctccctactgccccaacatagccttgaggaggcttctcagccaccaaagggttctggccccttctcactctcctctcctctcagatggaactctggttattatggtgttagttatcgaataaaaacgacttcagaatgcaaaaaaaaaaaaaaaaaaaaa

SEQ ID NO: 273 - DNA, 31737 bp, Homo sapiens
gatctcgatttctttgtgtttcttctccttcaacgctaagtgtggtgcgcattcattccactcgtgctctttagccgatcacagtaaaatgtcaggtggagctaggctgagccaaggagaatagagcatagactttatgggcttctcagaaggaagacttctcactcttgagagagacataggactaaggaagcatgtagtttcagttgctgggggaagcctagagcgagaaagagacagactttaggatgaaactgacacattggaaggcaggatgaacagactgggttaccgatgacatcgttgagctaccagaccacccaatagcatgttgcatgactttggatctccttgagcttattctacgtggactttgatgagcaccttggaggtgtatattcatgtcattcatcaaatttgggacatttcagccattatttcttcaaatattttttctttttctcctgggaaagaatcattagactttccctggctttggtttcctcatttataaaacgaggataataatggctgctcttagttatttggggggtttaatggagatgacctgttagttgatcagtaaattgtagttccttcctcattcattgcttgacatagaggattgcttaagaaaacagcagtgtgaatacaaaaaattagccgggcgtgatggcaggcacctgtaatcccagctacttgggaggctgaggcaggagaattgcttgaacctgggaggtggaggttgcagtgagcccagatcgtgccattgtactccagcctgggtgagagagtgagacgccgtctcaaaaaaataaaaaagaaaaagaaaaccacagtgtggaatttatcgacacttagatctaatacaggaagcaggaaattaaaaattttatgttaattgtattatttgtatctttgtgaagcatattttatttttttctgtttgagacaaaagtttactaagaaagacctgaagaaaatagtgtctttttgcaaaatttttttgctttgccatgtttactttatcataagctgaacattgtgttcttaatttatatcgtaatgaaaacatttaactgattagggatcacagtacctacagtacccttgaaaatattaataaatttgttctctttttttaggcataaccattgccatccaaaagttattttctgtgatgaacagctttttggtttcagatgaccattggcttatttaggaagaagatatggcctactttttctcttttcatttgtctctttcttttttctttttttaaaattatttatttatttattttttgagatggagttttgctcttgtggctcaggctggagtgcaatgacgcgatctcggctcactgcaacttccacctcctgggttcaagtgattctcccgcctcagcctcccgagtagctgggactataggcgcccgccacggcacccagctaatttttgtatttttagtagagatgcggtttcaccatgttagccaggatgctctcgatctcttgacgtcatgatccgcctgccttggcctcccaaagtgctgggattacaggcgtgagccacgtgcccggcctatttacttttttaatctacacaatgggcttctttgatgttattggtacatatcttctgttgcagtgcacagaaatttttctgatatacctgggagtaaaattgctgggtcatagcagatgcacttctttgatattaatagacaaattgttttccaaagttctctcgatgacaggtcacagtctggtgagattgaaatgcatgtgttgttttcaaggtttttttgttttttgtttttgtttatttttaaagagatgggagtctcgctctgtcacccaggctgggatgcagtggctggtcactgcaacctggaacccctgagctcaagcgatcctcccacctcagcctcctgagtacctgggactacggatgcgtgccatcacgcctggctttttccccaaggttttatattttatcagttgtacacgtattaaagagtcaactgtaatgtttgtaatgggggcaagcattgccttgccttgtcactttcttgtccccaaggtgtaaccacttttatccctttttgcttttttgtgtctgtttcggtatctgttttgcatgtcagaggcttacctccagtttgggaaggaagaagtaaaaagtgtattagaagctctgagtgcagcagaaggccgtgttgactgtttctctgtagggtgatgtgggtgtactggttgttggtgtctgcccctcagatcattatctttagagctgaagcctgtgggatgcttcagagaagacgcttgtcccagcctctgtccagggtggtgggagaggagtaaatggcccgtggcctgcagtcggggagcccagtggagaaggcggcttggtgatgagtatgtttgcttttatctctcacccctgtttttagtagggtgcccttgccctcaaacgtgttagaagtgccctagtctctctgttttgttctctaaagataaataagcagtcttccgtggcgtgggagagaagaggcaggcatccagtggcatttcaaagagcctttcaaccagttctccttattttagttgaccctccttcacagccccctccagagttacgtagtgaagccagagcctaagccttgtggggattctctcacgtaaattaggttacttggtctacgccactgtgggcttcaaagtttgcttttccatgtggattaaatcagctgtggctagtccagtttggcttcaagctcataaaaatgtggcggttctttctgtttccattctctttgttgtgacaggttttgagttttttaaattgctaattatgattactacagttttagtggatgtctcctttttttttttttttttgagacgggagtcttgctctgtcgcccaggctagagtgcagtggcacgatcttggctcagtgcaacctaatggaggtctcttgttgggattttaatttgtatttccttgactattaagagagttgacatccttttatcagcccattcatattaattttttggtcttgtgcctatgcaagtcatttgcccaatttccttttttcttttgagacggactctcgctctgtcacccaggctagagtgcagtggtgggatctcggctcactgcaacctttgctttcctgtttcaagcgattctcctgcctcagcctccccagtaactgggattacaggcgcccaccactacacccagctaattttttgtatttttagtagagacggggtttcactatgttggccagactggtccagaactcctgacctcaggtgatccacctgtctctgcctcccaaagtgctgggcttacaggcatgagccactgtgtctggccccatttgcccattttctaagcacggagttgttatgtcttttaaaaattgacttgtgggccaggtgtggtggctcaggcctgtaatctcagcattttgggaggccaagacgggtggatcacttgaggtcaggagttcaagaccagcctggccaacatggtgaaaccccgtctctactaaaaatacaaaaaattagccgagcgtggtggtgcacgcctataatcccagctactcgggaggctgaggcaggagaatcacttgaactcaggaggtggaggttgcagtgagctgagatcgtgccaccgcactccagcctggcgacagagcgagactctgtctcaaaaaaaaaaaaaaaaaaaaattgacttgtggctgggcacagtggctcacatctgtaatccctgtgctttaggaggccaaggtaggagttttgcttcaggccaggtgttcaaggccagcctgggcaacatagcaagaccctgtctttaaatttaaaaaaaaaaaaattagccagacatggtggcgcatgtctgtaatcctagctacttgggaggctgaggtgggaggattgcttgagcccaggagttcaaggctacagtgagccattgcagcatttcactgcagtgagatcctggccagcagagtgagatcctgtctctacaaaaaacaataatataatttgtaggagttacatattttgaatccgaattctttggcagtttctggctcagctcttcttcactctgtggtgtggaacttttggagaataaagtttttatttattaatttttttttgagacacagattctgtgttgcccagactggagtgcagtggcacagtcagcctcacagtcatgatcatagctcactgcagcctcaaactcctgggctgaagtgatcctcccacctcaggctcccaaagtgactgggcccacaggcatgcaccaccatgcctggctatttttcattttctttagttcagatgggggtcccactgtattgcccaggctggtctcgaactcctggcctcaagtgatcctcccaccttggcctcccaaagtgcttggatacaggcatgagccaccttgcctggcctagtttcttaactttgatataattaaatgtattaatattttcctttgtgatttatattttgtctatcttgtttaagaagtccttccctggctgagtgcagtgaacccaggagacggaggatgcagtgagacaagattgtgccactgcactccagccagggtgacagagtcagattctgtctcaaaaaaaaaaaaaaaaaaaaaagtccttccctaccctgaaattataaaaaaaattctcctgtatttacttctaaaaattgtgtagcgtttccccttcacatttatacttttaatccacttgtaattgattgaaaatatgtgtgattgataacatacaatctgcttttattttttccatataaataactgttttcacacatatttattgaagagtccagtctgtttttgagctgagtgtcagctctgctgtgaatcatattttcgtcggcctgtggtcttttcctgggcgctgtctatgttgatttatttatttatttattttaatttttgtagagaaaggatctcaccatcttgctcaggctggtcttgaactcctgggctcaagcgatcctcctgcctcagtgtcccaaagtgctgggattagagacgtgagccaccgtgcctgaatttagccttctttcatagtcatcattttatttgtgagactcatccatattgatagacttagctcattctttttaattttttttttttcccgaaacagaatctccctctgttgcccaggctggagtgcagtgatgtgattttgcctcactgcagcctccgcctcctgggttcaagcagttctcctgcctcagcctcccgagtagctgagattacaggcatgcgtcaccacacccagctgatttttgtatttttaatagagatggggtttcaccgtgttggccaggctggtctcaaactcctgacctcaagtgatccacccacctcagcctcctaaagtgctgggattacaggcatgagccaccgtgcctggcctgaaaaaatatttttgttggatgggattctattttatgaatgtaccgcaatttattcgtgttcttactgatgaatatttaggctgttttctggttataaagagcgctcctatgagtgtctcagatacagtctcaatgggagcatttctttaggataaatacctgcgtatggaattgctgggtggcagcatgtacccacctcaaccttgctggatgttgccaatgtgttctccaaagtagttaattatttttttcttctttcagtgcctgaagacctctcattagaagagagagaagaacttctagacattcgtcgaagaaaaaaggaacttattgatgacattgaggtaaaaaaaaaaaaaaaaaaccaaaaatccaaaactctgttttttgcttttgagtaaaatagtaaaagagtagcctcacaaaaatgtaaaaaaaaaaaaaaacccaaaaacaaaaaataacaaaaaaaaaagatgtttagtgtgtgcatataagaactacacaaagagacagagtgaaaagttatcaagttgggaaagcaaagactccacacaggcagtgagaccccgggtagaaatcaagacatcgtagaactgaggtcagcagtagccagctcgcaaacccagggccacaggcagcgtatcatctaaagcagcagcaagccacgagcgcattgctctgtcaaattgtgcactgagaccctctttcgttaactaatatgtttttttgtttgtttttttctttttgcttttttgagacagagtctcgctctgttgcccaggctggagtgcagtggcacaatctgggctcactgcatcctttgcctcctgggttcacgccattctcctgcctcagtctcctgagtatctgagattacaggcacccaccaccacacccagctaattttttgtatttttagtagagacagggtttcactgtgttaggcagattggtcttgatctcctgacctcgtgatccgctcacctcagcctcccaaagtgctgggatcacagacgtgagccactgcgcccagccaccaatatgttaatgttctagcacctagaacattgcctgttccatttttggctctcagatgccctttgagtgaatatgtgggcatgtattgggttccagctgtgtaccaagtgcctaccaggtggtaggagtaggatgacacattaggccgggcacagcggctcacacctgttatcccagcactttgggaggccaaggcaggaggatctcttgagcccaggagttcaagaccagcctgggcaacatggtcaaaccccatctctacaaaaaatgcacgccaccatgcccagctaagttttgtacctgtagtcccagatactcgggaggctgaggtgggaggatcacctgagcccaagaagctgaggctacagtgaactgtgattgtgccagtgtactgcggactgggcaacagagcaagaccctgtctaaaaaaaagaaaaagtaaagacaaataaaaacacaggcacacaaacatgggctcttccacacttgtgtactttactcagaggatggggtagagggcggtcccacaggagaagcatgtgaataaagccaccgtctcggcgtgggagagcctgtgattgttacagaagtgattcagagggccggccctggctccttccgtttggggcttccttgggaaagtcaatcagacatggaggtcttctttgagaagctttctagtcattgtcattgccaaaataaatgtggcttcacaggccacggcaaggacaggccttgtcccagacaatagctcctttctaggagtttgcgttttaagtccgagtgtcttggcatataatagggtcctgaataaaaatgtctttgtatttgaaaggtaattcatggaaatttttcttctaaggttacccttcattcttgggaaaatcagataacccagaattggtctctggttgaagaataaggatgtatattatttggaccttagtaatcagcctgctggataaatgtggaatcgtaatctagctctaactacttcattttatcagtgagcacactgaggcccagggaagttggaggcttccagaggtcagtctcattagtaggggtcacatcaagggaaagggggtctgtccccttggatgcatttggcttctctgagtgccctgagtcagttctgttcacccccgggctctgtccatggtgcttcatctcattcaaggtgatacaagtgatcctgagaccactgacctaaacacacctgagcttcagcctgagaccaccgatctaaacacacccgagcctcagcttctccctgggaacacaggcagtgttgaaggaggaggcaggtgacaactgtttgcatggcagggctgaatagtgcagttaagcgaactgaggactcatggctttccttttgctgggctttttttttttgtttttttgttttttttaaaaaaagagaccaagtcttgctctgtcacccagactggagtacagtggtgtgatcatggctcactgcagcctcaaactcgtgggttcatgcagtcctccctcctcagcctctctagtagctaggactacaggcatgtaccaccacactcagctaatttttctgtttttcttttttgtagcaatgaggccttgctacattgcccaggctgttctcaaactcctgatctcaagcgatccctctgcttcaacctcccaaaatgctgggattacaggcatgagccactgctcctggcttggttttatcttttcacagctgtgatattccccccccagtgtgcttgcctgattttatatacaaataccctaggatctgcagagtggacccctctgaacctggtatctgatgaaaagtgagcaaagaattttgtgttctcctaagttgtggtggctttgactatgaagctctagctgtattgataatagtattggtttttccatccctgtgatgctccggtgagaccgcagggaagcttgtcacaagagaactaaaatttctgagtctcaggggaggaaggttaagacccactccccacctcgaaattcttcttttttgacagaggctgaaatatgaaattgcagaggtgatgacagagatcgacaatctaacttccgtagaggagaggtaacaatttgtggctacacctttaagctatttactcttttctttctacctccatcctgtagtcaaacttgcagaaagtggggtgagagtggttgggatgtggggagcctgtggagttgttaattcctctcctctccccctactctgcgtggaggggtccaggggtgtttccctggatgttacctcccattgcctcctctgtaagtcatcatctgcctttataggttcaggcataagcacaggcacttcagggttgacccgcacagaaattacctgcctgcgtcataaggaactgtgctttattaaaatcactggtttgcatcattagctttttctgaagtgtctcaagttatcaaatgtgaacagcaatggtggctgcaccacccctgccgccactgcggagactgggggcccctccgtgagggcctgtgcttcgcttccttgagcccgttgttgcgggggaaagtacactggagggccgtgactgggctgcattgtgaaaacagcatgagtgatttttaaattatttcacaccaatagcaaaacgactcagaggaacaaacagatagccatgggaagaaagaaattcaacatggatcccaaaaaggtaagagaatgctctcccttttctggcctgcaggagatggactaattgatttgaactgccgtttcccttttggacagaggtcagaggtggtccgccctgtcacctcataaaagactgggagttgaaggcacatttttatcaaaaaggggcttttcgcgagtggggtgaagcagaagtgccttgtagggctggtgccctgggcagaaaggcctttctttcagagtgagctgctgggtgaggaagcagcctcacaggcacggcttggacgactcagcacaggccgggcttggctccaggcagtgcccttgctgtcgaggctcatattcgcatcttcccgcttgacctgggtcagggaatcacgtgactaggaaggagcaggggtgggagtggaaccctggtgtccagaggttacggactttataatctgggtgggttaagtggttcacataagaggactttattcctccattcaccttaaaaagcaggtgtctgtgaaaaaacaagggatcctccacatttaagccagcatctttctctttcctcaagttggattttctagggagacactcgaaaaccgtgaaacctgaaacatgtagctgcttgtttttgagaccgagctaagggatttggcagaatctgtgaagctttttgggggacattttggttttgagaaagaagggtagacctgagtcttcagggttgaggagaggaacggcgtgtccacgggaaggtctcgctgcagagctggttcacgccactcctgtggtcttcagtcggtctgcacttttttttttttttttttttttgagatagagtcttgctctgtcacccaggctggagtgcagtggcacgatcttggctcactgcaagctccgcctcccgggttcacgccattctcctgcctcagcctcccgggtagctgagactacaggcgcccgccaccacgcccggctaattttttgtatttttagtagagatggggtttcactgtgttagccaggatggtcttgatctcctgacctcatgatccgcccgcctcggcctcccaaagtgctgggattatgtgcgtgagccaccgtgcctggcccagtcggtctgtacttctaacgttccccttgcttttctggcattgagcctctgtgctaatgagttaattatttgttccttcgataaatatctgattgcagaattccattgtacaaggtctaagatctgtaaactcacataagtgcaggtgcagttgcaggtgatatttacagaagtgcatgtcgttatttcctgctcacggtttgcaggtctgggactgcaggtatgcgccactgcacccagataatttttttttttttttttgagacagagtctaactctgttgcccaggctggagtgcagtggtgcgatctcggcccaccgcaagctccacctcccgggttcacaccattctcctgcctcagcctcccgagtagctgggactacaggtgcctgccaccatgcccggctaattttttgtatttttttttagtagagacggggtttcactgtgttagctaggatggtctcgatctcctgaccttgtgatctgcccaccttggcctcccaaagtgctgggattacaggcgtgagcccagtgcacccggcccagtttcaccacgttggccaggctggtctcgaactcctgacctcaggtgatctgcccacctcagcctcccaaaagtgctgggattacaggcatgagccactgcgccaggccatgtctggattttcttaaggcccagcacatctgcacccagaggagggtttttgtttaatgcatacactctagccactgtgaaaactttcctgttgctttctggttctctgcttatggggcataaatcatctccaagatggaatgaaaattgtcaattttgtgaatttggaaatgatttgatattttgggtaacagcttttctttaaggagttggaactgtggagttagatttatcagcagatgtaataagcattggaagcatctcaggttctttatgaaagtggatgtgctcagaactgggtcttatgttttaaggggacccaagtagtgcagcacagggcagcacaccagtaagttcatggataaattctaatctcatgaaatacatacaaataaatacttattttttaaagggatgctactgagtcctggtgcggtggcttacgcgtataatcccagcactttaggaggcccagttgggcagatcacctgaggtcaggagtttgagaccagcctggccaacatggtgaaactccatctctactaaaaatacaaaattagctgggcgtggtggtgggtgcctgtagtcccagctactcgggaggctgaggcgcgagaatcgcttgaacctgggagtcaggttgcagtgagctgagattgcatcactgcactccagtctgggcgacaagagtaagaggctgtctctcaaaataagtaaataaataaagtgatgccactactgtgcatcaggtttcagcttcatgagcgtaaacttttcttcatgcctatgaagccctctctgtcaggctcttgactgtcttcctgttttatatataccgtgtgtcagatttataataagggccaacaaaactacaagttttgtagacttgaatatagcacttgtcagtccacttgagccttcctaacacaataccacagagggggccaggcgcggtggctcacgcctgtaatcccagcactttgggaggctgaggcgggtggatcatgaggtcaggagattgagaccatcctggctaacacagtgaaaccccgtttctactgaaaatacaaaaaattagccgggtgtggtgacgggcgcctgtagtcccagctactcgggaggctgaggcaggagaatggcgtgaacccgggaggtggagcttgcagtaagccgagattccgcccctgcactccagcctgggcgacagagcgagactctatctcaaaaaaaaaaaaaaaaaaaaaaaaaaaaagccacagagggggtgcgtaaacaatggaaatgtattttcttacagttctggaggctggaagtccgagatgagggtgccagcatgattggtgtctggtgagggctctcttcctggcttgctagtagccgccttcttgctgtatcctcacatgctggggagtaaggagaacttactcactctagggtgatgttcttataagggcacaaatcccatgaggccaggacctcatgtaacactgattacctccaaaagaccccgtctccagatagcatcacagtgggggtttgggcttcaacatatgaattgtgggggggacacggacatttcgttcacagctgcaaaggatgatctcacatgcttcagacacaactcaaaattatatctacctccccatgcccctattaaacctgtaacactatgaagcatgaagacattgtcagagcaaataaattccttccagctaggatggtgttttctaagtctcagagtgatgacactttaaacagggagctttggtttgttgaggtgcattatttctagaagtagtacttgagttcattaatgagtaagagggaaggtttgattagatcaaggaagctgaaaacactctgcagcctctcctttattcctgatttcctagaaatgccttaaataaaatatataaatctatatgacaagcaggggtccactcagtggactagaaattgaggaatccctggaagaagataaatgggatcagctggagaaggaaacactccccacagcacatacaagaaagaactgccgggggcggcaagagcagcttcagagttccccgagtgcagaggaggtacattcagggaacaggactgtgggagggacgtcgagactggtcacgctctcctgaccttgtgtctagcagtgattgtgtctccaggtgggaaaagcaagagggagcacttagtccgtgaaaacaggcagcgtcctcggtgggtggcagcaccaacaaggagaaatacccactcccagagaccagccgttggctgcctgacctgctcctcttccagatcactggaggcagctgcagcaaaaaccagaagcaagtagcattctgttaggccaacagtgaccctaaaatacaaagacaaacacccaccaagcaccaccaagcgtttgaggaaaccagcaccatgaaagagacatgaaacccaacaaacagaagaactaaggctggaggaaacagacttaatggaaacaatagaggcggggagggcggctcatgcctataatcctgacgtcttagaaggtctaggtgggaggatcacttgagctcaggagttcaaaaccagcctaacatagtgagaccctcatctctataaacagtttttttaaaaaaataagccaggcatggtggtatgcacctgtagtcccagctacttgagaggctaaggtgggaggatcacttgagcccaggagtttgaggctacaatgaaatgtgattgcaccactgcattctagcctgggtgacagtaagactttgtctcttaaatcctttatcaagccagatgtggtggcatgtgcctgtagtccaactactgggaggctaaggcagaaggattgcttcagcccaggagtttgaggctgcggtgagctgtgattacaccactgcactctagcctgggcaacagaatgagaccctgtctcttaaaaaagaagcaggaggctgggtgcggtggctcacgcctgtaatccgagcactttgggaggccggggtgggtggattgcctgaggttagaagttcaagagcagcttggctaacatggtgaaaccccatctctactaaaaatagaaaaaaattagctgggtatggtagcaggcacctgtaatctcagctactcgggaggctgaggcaggagaatcacttgaacccaggaggtggaggttgcagtgagcctagattgcactaatgcactccagcctgggcgataagagcaaaactctgtctcaaaaaaaacaaaacaaaataaaaacagaagaagcaaaaaaacaataggaggaaactttttatagtaggatatttgtgtatattataaatatcatcaaagagatacgataggatgtttcttatccatgatataaaaatgggggattgtgaaaaagaaccttggaaatgaaaactaggagtgtgtgtcacatcatcacttgagcatatggagaagacgtggctgaagagtggacgtgtgctagaacagagtttaagaattctttattcagttttgcagagacctacaagaaaacatgcacggtgggtccagcagcccaaatttcatgtaatagaagtcacagaaggagagaatggaaagtggaggagaggaaatatttcaaagaaatcttggaatattttagaactaagaaaaatccttagattcaaaggccccaccaaatgccaagcaggataaaaattgaaaagacttatacacatagacgtgtcaagtaaaatgttgtaaaactcatggatagaggaattcattaaatttcccaggaaggaaagatcagattacctaagaagaaatgaggagcacagcaagcttgtcagggatgctggatcaaagacaggaggggagcagtgcctgccaaggcctgaggaaacatgatttaaaaccccaaattctgtctgtcctgtcactcacaagagaaggtgaggaaacacatgttcagacacacaagggcttctctgatgtctaggaattgtgtaattggagcgtgacacctcaaaacaagaaatgactacataggataaaaaaggaaaggcatgcaaagaaacaagcaaaactttgaatgtcaaagtgagaaatttattgtttaaaagattttttttaagtccaaatttatgtcagtatttaagtagcaagggggaaaggaaggaaggaaggaacagctaaggttttctagatgttgatagataaaaataagtttaaatacttgtcaaaattttaagagtaatcactgaagagaaataggatttttaaattattaacaaacattgaataaagaaagtttgatccattcaacacaaggctggaaaggcctgtgaaatagaaagtaccaaataaggggtcaggagtaagtgctaactaatcagtgctcaccgtagatttgattgggctaaagtaatgacaagacagacacttgggtattaataaaataatataaaataaaatccagctttggattgagacccacacctagaagagaaacagaaaaagatagagtaggtgtagtgggtcaaatggtgccaccgcccccatttctgctgtttgacttttaaatggtattttaaaatagtaaacatttctaataatgttagaacactcactttcttttatgagtatttacctagtgtattagtattctagggctgccatgacaaatgaccagcaacggggtggtttaaaacaagagaaatctattctcgctcagttcaggaggccagaagtccgagatcggggtgtgggcaggattgctgcttagactgagggagaatcccttccagcctcgctcctggcggctgccaccctcctggtctccacagccgtgggcacctcactgtggtctctgcctccattgtcttgtggccttctctgcaccttctcctctctgtctcataggacaagtgtgattgaacgcagagcttctgtgtcctcctcctctgcttgtctctttgtcacctgccagatagcattctccaagaaatgtcagtgttttgtgtgttctgaattttagggcaggccttgagcatccagaggaaggcatgggagcctcatgcccaggcccattcagttccctgggcttcagctgacagtggcaggggccttcaccatgcagggtcaggcccccagccctgtagccccagagatgacaggacaactagtgatccctcagggtgtcctgtctctcctcccacctgcagctgatggcctcacctggcttctccaccggcctcacttgttttcctcacttagagccaatagcaaagccccagcactgtctttcctgccctaggctctgttttcagggaacttgggctgcattaggcctctcgaaggaccagacctgcattgctactgtgtgtgtgtgtgtgtgtgtgtggtttgtgtgtgtgtggttgtgtgtgggtgtgtgtggtgtgtgtggtgtgtgtgggtgtgtgtggtgtgtctgtggtgtggtgtatgtggtgtgcgtgtgtggtgtgtgtgtggtgtgtgtggtgggtgtgtgtggtaggtggtgtgtgtggggtgtgtgtggtgggggtgtggggtgtgtgtggtgggtgtgtgtgtgtggtgtgtggggtgtgtgtggggtgtgtgtgtgggggggtgtgtgtggtgtgtgtgtggggtgtgtgtggggtgtggggtgtgtgaggtgtatgtggggggtgtgtgtgtgtggtgtgtggtgtgtgtgtgtgtgtctgtcttgtaatttagatggtgcccctgtgggtaccatcaccagatacatatgagaattgatttaggattgttagactcactgatttttctggagaataacattaaaacatggtgcacaaattctaaatgtacagcttgaagaatctttataaattaatacactcacataactgcaacccagaacaagccgcagttgtagaatattacagggcacctttctgatgcctcatcctagggaattcactccccagggtaaccagtccttaatcaccataagttttgcctttttaaaaccttctgtgaatggaactgaaatactcttccgtgtcgtcttttgctccatatcatgtctgtgagattcattcttgtgagtgttcattccatttcatggctgtagagtcttccatcatgtgattatgccagaatgtactgatcggttctcttactgactgttttcagtttttggaaataaggctgctgtggacgttcgtgtgtttaaaaaaaataggaaatttctggatggaccgtgagggtatgaggcagccctggtcttgggtactgagagtcttagctggataaagcctctctgaatttgtagaaatggcctcctggcaaattgatttctgaattccctattcccttgccacccttgccaacacatattttgaaactggctgcaaggctgtgttagaggtaaacatttctattaataggttcctgggacttctcatgagacagtgctcagctgattcaggccaggggcagcccattgcctttgagattgtcagctgtgccgcagccctcagagtgggcatgagctttgactggatgagcttggtggcacagcatgtcagtatgtttttggcatcaggtaatagaaaatccaacaaaatgtatcttacacagggcgaggtttatcttctcacacagctgtgtagcagtaggtggctcccaagtggcaagaaggcggtccctgtacacatctcagggtttcccatgtgagatggccactgtggctctggtcatcacataagtgttcaaggcagaaaggaggaggaagagcagtgctggctcatgggctcctttttaccaggaaatcaaaaactttccctccaggcttgcctttctgtctggccagatctgggtcacaaggtcatttctagtgccaaaggcagccaggaaactccctctctagtgaagggggtggcagggagcggggaccagcaccacccgcttgctgcgtccctgggagtggggccaggttggccaaccggcagtggccaccacccacaaagttttcctcgcagacacagaataaactatctttctaagcttgggaaatctaatattactgttactcctgcctttataatttctaataaccacctgtaatggtttgttcaataacccatttgtctgtcttttaacttgttaaactgaacaggaggaatgaacgtgcgtttctttggtggataaaatgtagtatggatttgggaaaatcagattgtgcagttgtatgggtgtctctggtattatttttgctgtgtccataccagtaaaatcctgacactaagtgtatttctgtctttgaaaaatgagtttgagtgacactcctaaccagtgcttccattttaatgttcttcagggaattcagtttctaatagaaaatgacctgctacagagttccccagaagacgtcgcccagttcctttataaaggagaaggcctaaataagaccgtcattggggactacctgggtgaaaggtgagttagaggaggatgcaaagccctacctggggccactcagccctgcagcttgacctaggctcacgctccactttcggggccatcacagcctaaaggcatgatagagccacgggctgtgggcatccacatgcccgtctcaataccaagcgagcccagtgcaaccggttcctctcccgtgtccatgggaggagagaggcattaccgtattatgggatcctgggactcctctggaatcctgtttttcagggagccacaacagaactgacaatgctgctgcccctttctccttgtcttggaaagcatcttaatcgtcttctgttttgcccagaaataagcctgatttctcagtggttttctttctcctgttacttgcagtatgaataaaggtggaaagtgaatttttttaatggaaagcagcaggtcagatttactttctgactgcgactggcttagcagaggttagggcaggactgctgaggcagcacatgccctgagtatggcaaacagacttttgtcaaagaccagaagaaagtgtttttaaacaaaagcccagtagttcctaaagttgggcggttttggtttttagcttttttaaaaaaaatatttgatcgaaagtggaaagtggaatacttcccgactcattctctgaggccagcactacctgatacccaaaccaaagacaccgctagaaaatggcagaccctatccttatgactgtaatatatagtaagcaataggtaaaaaggattgtgcaccaagggggacttaccccatgcatgcaaggttagttcaacatacaagtcaattaaagtaatgtatctttcacataaaggacaaaacccacatgatcttctcaacaaatacaggaaaagcatttgacagaactcaaaactccttcacgataaaaacacttaaaaagctaagacaggcatggaacttcttcaacatgatggagggtacctataaaaaaccccactttaacatcatacttaatgatgaaagactgctctcctgctaagatcaggaacgagacaaggaggtctgctcttagtactgctgttcagcccggtgctggcacgccttgccaggacagttagacaagaacataaagacatccaaattggaaaggaagaaattaaattctatttgcagatgatgcaatcatatatatagaatatcctaaggaatcattaaaaactattagaagtaatacattcagtaaggttgcatgatatacaattaatatacaaaactcaattggccaggcgtggtgcctcatgcctgtaatcccagcgctttgggaggccgaggtgggcagatcacaaggtcaggagatcgagaccatcctggctaacatggtgaaacctcacctctactaaaaacacaaaaaattggctgggtgtggtggtgggcgcctgtattctcagctatgcaagaggctgaggcaggagaatgacgtgaacctgggaggtggagcttgcagtgagccaagatggtgccactgcactccagcctgggctacagagtgagactctggctcaaaaaaaaaaaaaaaaaaaaaaaaatcaattgtatttctatacaatagcaatgagtaaactgaaacagatattaagtaaacagctccatttataatagcattaaaaggaataagatacttaggataaatttaacaaaaaagcaacatttttactccaaaaaccacaaaacattgttgaaaaaaatgaaaagacctaaataaatggaaaagcatcccatgttcgtggattggagggcttactattgctaagatgccaatattccaacactgatctacagatttattgtacttcttattgaaatcccagctgacttctttgcagaagttgcacatcctaaaattactatggaaaattcaagggacccaaaataaccacagcagtctaaaaaagaacaaagttgcagaactcacatttcctgattacaaaataaagtggccaggcacggtgactcactctgtaatcccagcattttgggaggctgagacgggcagatcacctgaggtcaggagtttaagaccagcctggccaacatggtgaaaccccatgtctacaaaaatagaaaaattagccagacatgatggcaggtgtctataatcccagccactcgggaggctgaggcaggagaatcgcttgaacccaggaggcagaggctgcagtttgtcaaaatcatgttattggactccagcctgggtaacagagtgagactctctcaaaaaaaaaaaaaaaaaaaaaagactaaagtgtatagtcaagacattgtaagactggcataaggatacacatacataaatgatggaacagcattcagaatccagaaataaaccctcacattaatgtcaaataatttttcaaccaggtaccaagacaatttcagtggggggaagaatagccttttcaacaaatggtgctgggtaaaagtaggtagactctacttcatcagaatattgtgcttcagaagacatcaagaaattgaaggctggccgggcatggtggtgttcatagctaatcatcagttacagattccttggttccttccccactcccactgcttcacttgactagcctgaaaaaaaggtaaaaagacaacccacaggccatcctgggtaacatagtgagccctgcctctacaaaaaatagaaataaatcagtattacttgcaaatatcttcatatatttctccttatataatctagatgtaagtccttagcagattataaggaccagttatcatactgattcagtccttgtaatctcctaaggacttctatctagattatataaagaactcttccaaataagagtaaaaataacaaaaattactcagttataaactggcaaaggatctgaatagacgttacacaagtggccaataagcacaggaaaaaatgctcaattgatcatcaaggagatgcagattgaaaccacaaggagaggctgggcgtggcggctcaggcctgtaatcccagcactttgggaggccgaggtgggtggatcacgaggttaggagatctagaccatcctggctaacacggtgaaaccccgtctctactaaaaatacaaaaaattagccaggcgtgctggcgggtgcctgtagtcccagctactcgggaggctgagacaggagtatcgcttgaacccaggaggtggaggttgcagtgggccaagaatgtgccactgcactccagcctgggcagcagagcgagactctgtctggaaaaaaaaaaaaaaaaaaaaaaaaacccacaaggagataccatttcacacccattaggctggccgtaataaaaaagacacataacaaatgccagcaaggctgcagggaagtcaaacccttattcattgctgataagatataaaatgatgcaggcaggtgccgtggctcacacctgtaatcccagcactttgggaggctgaggtgggcggatcacctgaggtcgggagttcgagaccagcctgaccaacatggagaaaccccatctctactaaaaatacaaaagttagccgggcatggtggcgcatgcctgtaatcccagctacttaggaggctgaggcaggagagtcgcttcgaacccaggaggcagagatttcggtgagttgagatcacgccattgtattccagtctgggccacaagagtgaaattctggctcaaaaaaaaaaaggatataaaatgatactttggaaatctctctggcagttactcaaaatgtaaaacataaactttaacatggaacccagtaattccactcttaggtatttactcaatagaaataaaaatgtggccaggtgtgggggctcatgcctgtaatcccagcactttgggaggcccagggaggtgtgggaggaccacttgagcccaggagttgcagaccagcctgggtaacatggccagccctgcctctacaaaaaatacaaatgttttaaaaaagcatggccatgcagaaacttgtgcatgaacgttcatagccacattattcatcagccgcatcttttaaaatgattgcgataatgtacattaggtttgaaacttacttctttttttcccagggatgaatttaatattaaagttcttcaagcctttgttgaactccatgagtttgctgatctcaaccttgtacaagccttaaggtaagtatgatcatttgctgggtgtagagtggatggggaaggccagaggaccactgcctgggcagcagtggcggtgaattgactccaggtaacttggtgccacacgagtctcacagatgctggctccttttccggatgatccagctaatgctgtgtgacactgagcagccctagacaggaattggggcacacgcttaagataagggccgtgctttcctcactgtggccgctgatgctccttccattccgtttccttttatttgtaatggtgtatggcagtagtcgagtgccttgttcccaagctctgtatggcgtggcgttggtgctccatggggttacttccttccacacttgacccaaagcaccaaacgcatggatacctgagtgtgccagagaggatgtaggtgtctcgccattttggtgtctgggacacactccctggatgcccccttgagctgcccttcctgcacgttgtcttcctcctgctctgcaagcaggaagttgtctcgcttccttccttggtgccctggctgagtcgcgtgggctcttcatctgttctgggccttgaccctgagccagcactcagcagcatccgggggagaggaggcagggcttctggtgggagtcgcctcagccggcccttggactaagaaaatcaggccgcacctcgtcatcttctcaaatcttcggcttcataccttgttctcgtttacgtggactgtttgctcatggccttacctcaactgcagactgcaatgttggcagcgtttttgtgggaccctcgtgatgttgtgctcacagcgcagcctggggctgaacagtgcgctgagagttcgcaacatataagaatcctgcagccgcagttcaggcttatcagattgcgtttctggaagctgtacatccagagaagggtgcaggcctggtgagtctgggaggggtgtctggtgcggcccttgcagctgtgactccatttctttcagtccatcagtctctggcgagagccggagaggttcctattaattcccacagccgtgggagcctggcatagccccgtagagggcctgatggaggcacaggatgggcgggaatacaggcaggtcctgtggcctgaggagctgccctgaggatgttagcttttgtcctgaggggcacggcaagcctgtgtggggcagaggcatgcgggctgactcgagacgcatcactgctgtggggtgggcaggtgcatgctttgctggtgaatgtggggcagagagggagtgaggggtggaggaggggtggttgtgttgagtctgaaggctgctggtgcaggcctggcggagaagaaggggcctggtagagagtggggccagacgtggctggaatcctgggaagagagagcagaggaaggaccctggggagctgccctgtgtgagggacgtgcagaggaagaggagccccgcggggccaggctgcatcctcccccgatggctggtgggatcagtattttaaaaagcccagagacttaattggagcctcaaggtctaactcggtcttgatccttgtgctaaatccacggcagcatcagacgttgctgaatagctggtgcgggaggctgcagctggccatggggactgcagcccctgcctccggggctcactcctgggcgggcagacggtggctaaggcagacaggtagcaggggtggtgccacgcagccaaggaacgcaaggaagggaagcagtgagcgggggcggggcgggttgttgggctgggggttccaattacaggcagggcagccagggagacctcagccagaggggatgcctgagggtgggagtgtctgctgggcctggtctctgaggcaggcatgtgtctgcccagcaaggcagcagcagcttctgaccgcagcgcccagtgctgtaggtggggctttggataccgtcctgtgggctatggctctgccttatgtgtgggagttctgaaaggaggaccggctggtggcagctcgggacaggcagggctctggtgatcacctggcagcagcaggagatggtggcaatggggacagagaagtgccaggatcctggatatttactttttaggcagagacaaccggcctcgctgctgaattggttgtagttacaaaaagatgagccatcagtaagcgtgtctcgagttatggaacggaaggagactgtcctgggtcttctcctttctgtctctgcgcccccaagcccctgccagagctgtaccccaggctcgggaggaaaacgtccttcctgagctgggcagaagccgcccttggccgtgaggcggtgttggttctgatgcggcttcccatggctttggtgtctccacaggcagttcttatggagcttcaggctgcccggggaggcgcagaagattgatcgcatgatggaggctttcgcttctcgctactgcctgtgcaaccccggggtcttccagtccacaggtcagtgcagagcccacagcctggccccttgccaggcacagcctccagctctggagggggcggcccctgtgggcacagcccagcgtgtgttcctggggacctgccttccctgagcgaggacgacctgtgggccgggcacctcttgcaggcgggcccccagcacgcggggtcccactgtccactggaggttctggctgagcccagcaccccggactcgttgcagacacgtgctacgtgctgtcattcgccatcatcatgctcaacaccagcctccacaaccacaacgtgcgtgacaagcccacggcagaacggttcatcgccatgaaccgcggcatcaacgagggcggggacctccctgaggagctgctgagggtgagctccccggcccgcggccgctgccgtctgcaggatctcttcgctgtgagcggccgcagcgcccgcggctctagacacgcctcccaagcctccttgccgccctggtcccgctgagctttctgcccggccagccattttcctccgagtctctgaactggctgctgttttccctccttgcagaatttgtatgagagcattaagaacgagccatttaagatcccggaggacgacgggaacgacctgacccacaccttcttcaaccccgaccgcgagggctggctcctgaagctgggtgagccgccggcccagcgggacccgggcgtgacccctctgcccatggcagcagcccctcgggttcctcccaggctcatcgtaggaatgccccccaccgcaggcagagacgttaaaaagaaacgcggttaagccagagcccgctctcggtagctgcatggccacggctgcttctccgagccggggcctcagagccatgcccgcggcagagagtagcgcccaggctgcacggcccgtcccagaaaactgctgagttagcatccagatccagccagggcagcttcctgcacgagaagcaagcgcattatctccacagagcctgtgtgcctctctcggtttggtgtggctgtgatttttgacgcgtggtttaaatgtgccttcttgttgttttccttctgcctgtggctcccacctttctgttctgtgacgggctgtccctgcttgtcctgctttaggaggtaggtacccagtggctccccgccccctcagcggctcattcctctcgctctccccacgttggtctgtgtgagctccgctgtgtggctgccattcatccgatccatctgtggacttgctggggctgcgccgtgcacggtgtggtgaatgctacacccacccccaggggcggggctgagagtggctgggacctggagcacatggggatgctgtgtgggaaccaacttgccccccaccctgtgtctctaggggtccgcagcagtagagaagcagacagccagccctgtccctgcggcgtcaccctccaccccatactaacccagcagcgcatggagagatttcgggagtgctctaaaggcctttggagcaatttagggcaattacgggcagttttagaaatgctgaggggttgttttgcctgcggggcggggatggttgccttatgcccacagtgaagcgggcgagatgcggtagctgggttcacgcaagcctttctgagagcaggcggccgctgggcagcacgtgagacatggagtggagcatcctggtgattttttaaaaattttatcagccgggtgcagtggctcatgtgtgtaatcctagtgctttgggaggctgaggtgggaggattgcttaggccaggagcttcagaccacctgggcaatatagtgaaaccccatctttacaaaaaattagcctggcgtgatggtgtgtgcctgtagtcccagctactagggaggctgaggcaggaggatggcctgagcccaggaggttgaggctccaatgaaccatgactgtgccactgctctcccacctcggcgacagagtgagacctcgtctcaaaaaaataaacatcaaggaagggtgagacacggtgtgacgggcacaggcctcctcagctggtggaaagggtgtgagtcccacaggtctgccattcccattagggtctttgaccttggccattgctctttgacttttttctggctgtaccgaggtttaggggagttgtagatatttgcctgaaaacctagtaccatggtctttggctcgggtgcctgagagacccgattcaaatcacattgtgcgagtgttctagagtgagggccggtgggggggaatgtaaccggaaatgccggcaggcactctggggccgggataagtgggatgttcgtttgattagatgcctcccttctggttcctgcgttgcccaccagtgtcccctcgagggacagtgacgccatcagcctgcctggcagccaatgtgacccctgccaccagggaaaggtcggctctagagacgtaagtgtgtgaatgaaatgaaggcacagcagagctcgtgttgtctaacctgttttctggttgggcagataaacaggccatgaaatgagtgcacacagtgctcacgggaaccaagagctggctgggcgccgggtgccaagcgcaggggccctggaggggctggtccagctggcgtggcctcagtgtggtgggcggcccggtgagcacctgctgctctaggggctggcttccttgtcctctcccagcaccctgtatgtctgctgtgttctcagaaacaaagttcgagaccaaaggctggcgagccagggccctggctggaggcagacgagatgggtgcaggatctagaacgtgcttccaggcgtgtgctcagcggggagtgcggcctggcttggttgcattcttattgtagatttgcttttagaacaggtggtcttaaaaaggcctggatgctttgccagagcgtaggagccctgctgtgtacacaggcgtggcttacgattgttggtaacttaagacttcgagtcttgaatcaatcaccagaaaaaaaaaaaaaaaaaaaatcctaggaggtggcccaatccgagctgccatacagaaagtgtgtgcatgtggacctgtgtgtgcacgtacgcgcctgcctgctaacggcaatgaagacagaaacttacagagagaaagtggctcccatctgcaggttccagaagccaggctcttgtctgcaggcgagaatgctgtgtggtgtggccagaaacaagtgtgagcagagcctgctcggctctgagaccaagcttatcaccccttccctgggcctgcagtcctggtctgcaacgaccccctggccctgaggactggacagggatggggctctgcatgggaggtgtgagcgggggacccaaggtggagctgagaggccacctggcagacccctcccaggcggggccaggtgtgtgggctagtggaacatacaggtcctttgctgtccaccatgctgggagcgtggaggaagagagcaggcgctggacagaaacacacaacctgggggctcctggatgagctccccaagaactggagactcagataacagggcagggagaaaggccacagctggggagccaggaagggcagcccctgctgccgcccaaggagttgggtttaaagctgagtgcagtgggaccctttggggggcttcaagccggaggggcatgattgccacgtttttgaaaagatgcctttggccgctgtttgggggatggcagctggcaccagtgcagctggagcggggcctgctctggagtctctggagggaagcagaggcgaccgtgacagtgacggatgtcagggtagtggagttgctgtcagctgattctgccacagcagttcaagctggagcaagtgcctggaaggaatcagcactgtcctcctgtccctagggtctcggggacatagaacacctctcactgctcactggaggactgtgggacaaggcaggttgcccccagggtctcctgccctcccctgtggacttgggcctccctggtgtgctgcagtggaggtggggaaggtgaaggccaagggcttgcagagagcatggagcccgcggtgagacagggacacgagggcaacaaggactttgggccttgctgtgggcctggctgggtcttaaaggggaccagtgaggcggtgccacagttggggcagagggttccagtgacggagcagcttgcaggggttcggggagtggaagccccgccagggctcaggagagatgttgggggcagggtctgagggctggggagatgcagcagagagcttgggggcagatttgcccagaccagggtctagacagaccctttaacaggtaggctggtgggacactgatgagactggggcctgtggggagaggaggaacagctggaggctgggctcctgttccaggctggcggtggcaaccgcattgcaggctgccttaggcatcaaaggaggacggcagcactgagtgaggcaggggccagagggtcccagagggactgcagagacccgcttccggcctccagttccgctgagccaggcttcctcccacctgcagctggttcctcctcacccagggtctctgcaaaccaggccccaacagggaaagccccctgtgtcctggtgatccatccacagagcccttcgcacacagtcttgcctccaggcctcagcgcccgtgctggcccccacttagggagggagggctactcccctgccggcctgtcacagagaaagccgggtgagctccgcagcgctggagaggcatggggcagagagggcctagtaccccagggagcacttgagttcattgtcaccagcgtgtatttctttgaattatttaaaaaacaaacaccggcaaggctatagcagctgaagtcagtttgtctctgctcagtgtttaaggatcagagatttccttcccttagggagaggagggcaggtacagatgggggtacgtgcgtgtgcacgtgtgctccagatcttgttacaaaattaattcagtctcacgattccttgggcccaggggtgactgattttgatggatcccagggctgcccaagggcctctgtaatgcgataaccacctgacatggtggggtcaggtcctggacagagccaggcgcgcagtcctgacttcatcacactgccatctcatgtgggaaaatgacgccatccatcccactaactctcccaggaagcgaattgtagcgcggttgtgtcatcaaggggcccatcagtgccgtggagggggcgccggtgtgggcggggtgggtgcatgtggggccctgcggtgggaacgctgaaggacacctgaacccaagcctggcgcctggtggcctttctgaaaacgcagtggtctgtgcaggtccagggccccctcttggacccgcgggctccctgtgcacggagcgcagactcacggggcccttctgcttctaggagggcgtgtgaagacctggaagcgccggtggttcatcctgaccgataactgcctctattactttgaatacacaacagtaagtaagggccaggcctccttgccgcctcccagcagtcccggagctgccctggggccgagggaccctcaggctggtgacccacagtgagccccgccgtgtactttcctcttgtaggataaggagcccaggggaatcatcccgttggaaaacctcagcatcagggaggtggaggacccccggaaacccgtaagctcttcctcctgaaccttctctcctgccagccacctgggagccatcctcactgcctgcagggaacctgccccaagcccccctgaccgcctcccctctctctttctccaccagaactgttttgagctctacaatcccagccacaaagggcaggtcatcaaggcctgtaagactgaggccgacggccgcgtggtagaggggaaccatgtggtgtaccggatctcagccccgagcccggaggagaaggaggagtggatgaaatccatcaagtgagtggggcctcgggggcggggccaggcccgtcttctcgtgccggttggagggcgggggatggtctggaacatggatgcttccgtgtgcaagagtggaccttctgtctccagaaaccccagagggccgggctgccaaagccgacgttcagatctgagcctgcggtcctgtctgaggggcctctggggctggtgggaaaggggaggtctgtgtgtcacccacgacctaacctgtgtgttttccttttttcaccagagccagtatcagcagagatcccttctatgacatgttggcaacgaggaaacgaaggattgccaataaaaaatagctttcctggctaaaagacccaggtaaaagacccaaccccagcagaaagacaccgcgggcggcccctccgcggaaggcgtggcagggaggcagtcgccctgcggtgcaagctgctgctccagagcataccgtggcccaggtggtatccccaaggcctcgtgccgtggctggggtcctgggaggtggtcgccctgcagtgcaagctgctgctccagagcgtaccgtggcccagactgatcctcgaggcctcctgccgtggctggggtcatggtcggctgcgcatgtccagaagcatttccttcctgcgaccatcccggcgcccctagggggagaagccaggacagcagcttccgctgtctccacagcagacacgggacggattccacagacgggagcctcat

SEQ ID NO: 274 - DNA, 31737 bp, Homo sapiens
gaattcctaatcgttttttagcaaggggccccacacttctgttttgcactgggctccaaaatcattggtgtttatgaatccctggggagatgcatgtctttcctccttcatttctttcacatttccaaactctgtcttcagcattacccttagaacatcagaagtccctgcaaggcccagagctcctgtgcccaggatccaggctccctaggtggcctcagccaccccttcctgaggggctgcaagggcggggggttttgaagatctctgctgtcttttccacaccctctaccaatactccctcttaagtttgggtgaaattactcttcctctctctcttgttcttattaccttttaacctcttgcactcaaggcattccctggttttgcatccttaataaggttaggtttacaggagacagccacaaccttgtcttgtttcaccttcagtaccatgtcctgggcatacattcacagatacaggaaataactttgtggggaagggtattaactccacacttgaactgcctgaatcctcattttttttccccctattgctagcttgctctgtgacttgaggcaagtaatacaaactttctatgctgttatttcctcatcggttcagcacgtatttactagccccgttgagggcctggcgctgtccatggggttaatgataatgccacctcctaagcactcacgggcactcacgggcacacggcttggttaagttggtgagaatccttactgcccacctgcagggcttgcttgtttatctcaaagtcgacttctcacaggtgctactgtcttttttgtcatttgctcatcatctttgggctttccgatccagtggggtagagtttgccagcatgtgactgaagaaccactgcattagaatcagctggtgacctgctgggcactctgaattttcaacaatctgacatgcaagaacacactaggtggagaatggcttgagcaggcagtggttctcagccctggggagctaaaagtaatgaagtcttgctctggtccagaccaactgggaggaatatctgggaggggcgcaagcatctgtgtcttttaaatgctctctctgtagattctggtgtacattgagggttgggaacaaccatgcctggccctttaccatatcaggccttggaacatgggttttaagaacactattaaatacgagcctctgcctgctttcagttttcccctcttggaccaaataattgggagaaaaggccattttcttccccaaatggtttgttctctttgtgtgctggaacatagccttttcctctgtgagtttgcagtgccagcagatcaaaattataatagcaaatgacaaaagctaagttgtaagataaggcagagtaactaagactctaggaaaggcccatagggcacttcatagttcctggcactgccaccttacagggctcggatgtgaccacacatacagcaagttgttctgtgctgagatgtgaacttaatagaaagatcctgacctagcacaaaacccgcgggttaaaataatagcataatgtattgattcattcctcagtgccagacactgggtcatgtgttgttgtgttgaattctcacaatgctatgaagtgtgagtgctaataatctccactttacagatggaggaactaacgatatgaatgactaaataccttaccatgtcacacagctggcaacggctggtatataaatccagttcatatatttaactgttcaaaataaactagtggtagaaaataagcaatgtcccttagtaatgaggtctgatttgatattcacagactagatctccccatggccaggcttcaggactgtagcagagggaattggaaggttgctgtttctcttctctggtctgagtataaaatcagggccacggactggtgaggatttggtcttggcataagaggatttttttggtttagatgggtgatttgctctctaccgccatctgctggctctctgtaccaagcataggcccaagctccacgtttctcatcacaagtggcacagggtatggtgtccaaatgtggacacctcatctgtgtggtgaaacgccttcagttcacagtgtcaaaagtaacaatgatgtgtatttctccaggaaagagaacttctgtggttttaaataatgaggatggtttctcctgtttctcttaactactgatggatttgtaaccatattccaaatactagcttatatttctctgactcccagagcagaatagaaagcagtataagacagcttcgttgccttctaatgctgcagctgccttggtcagcccagctgggacatcatgattacatttctgttctctgggtttgtgtcagaagtagaaactaagcctggatagacaggagaagggaattaatgtcagaactttgtcagggatctgccattcaccaaggtctcaccagaaggttcccagaagagactgtgtggttctctttaccactcttgcatgcagaagaacaattaggttaaaaaaggatggcaatgggatgttattaggaaacatgaatacagcttttgacacactgatgtcttcctttttaaaatggttatctaaggaatgagagtgacctggtattgtatctattgcctggtggacagacgccatgagattgacttgtctgatgtgacaaaagacaattgatgtgttgaaagaactgagtacttagggagagacgcagttgctctctgagagaaaatgttcacagctcattaagttgatattgcaagcaatgaaaatgtagcaactccttctcttgttctcttcccttccacccatgtgtagccagaaataatccttgctaagctccgcctttacgttggttagttcagtggaaccctttttcaaatgaaatcggagatggtgaggtgtcaagggaaatgcagcagtgggatcctcaaactcccgcctcttgctgtcctatttcctggccctctccttgccaggaacctggcactcttctgaggaatgcaagagctccctggatatggtctgaaaaacactgagtgccatgtgacttgactggttcattagtctgggctgagttggaaggttttggtctttgttcctgagcctcttaaaattttttaaaagagaggatatatagatatatatttaatgtcgatatttaattccaggttgtgggttattataatcttttttccttgctgaatttattcccccaaataaggttaaaaatagcaggacaataaatacagtaaaaaagtagattatttagtttttgctgatgttggaaaatcattaactctttgcttcctgataatgctgaagagtacagcattaaatcctttctgtaataaagcataaatagatacttgaccaaatacagctccaggcccttgggacaaattcaagtcatttggccttgagaggccagacatgctgttggaggccttgggagaactggtgtgttcatgcttacagtgaagccatggattccagacctgcctggaaaagggccgtgtctttaaaacaatcaatggcattataaaaggactatgatctgaatattcaataacagttaaaatatataacgtatcactaagatgtaatgtatatgtctatatctgtatacaatgtatgtgtatataggtacacatatacatttgcatcactttagtttttgatgcatggatatctgcttacatatgtctggcccctttttcaaatgtaatcttcattacggtaggggcctatcttgttcactgttaagctccactgtcaggcacagagtagtgctgaataaaaatttctgaaataaaggaatgaatatatcccatctttgaatgttcttactgagtaacaagggtggtatcttttatttcttggcatctccaaggactcaaatatttgattttgatgttttatttcatttgctcagtaatctttattgagcatctaccacgtgacagtcactgtgccaggtattgaggatatagcagtaaataaaactgataaaactctcttcacagacctttctattctactgagaggaagcagacaataaatacagtaaaagtagattatttgttttttgctgatgttgaaatatcactgactcttcttccttcctgatgatgctgaagagcaaagcattaaaccctttgtgtaataaaagtagatgatgcaaagcctgctagggagacaactaattcagcccctcctcccaagcccctgcaggagctgagaaaaacaccagggagaaaacgggaatatgttgactcctgagtggtaatgaaaccccgaaaagggtaggcaaagagatcaggacaaggagggggggctgtggcaacaggatcatgggcgcaaggccgtgtggttctctgcagctgagctgcatgccctgtcagcttgcaatgacatcctgactgctttcaccatacatctgtccttcccatccttgaaagcccatcctgatgtttgcagtggaggattttgattaattgaccctgaactactgttgccagggtgtctctactcctcctggcgggaataatacatcggcctgtgtgctttttcccaccatttcaagacctgtagcaatgaattcagaggaaggagtaaagacagttatctcatgtatttgtttaaagccttatgccttgaaaaactactttctcttaataaatgcatttatctcattggatcctctcgggaccacagtgaagtgattaagatcaagattatagttaggatgtccgcgtaccccaaattaccccttctgttgtcccagcatcccagctggtttagtatttgtcttggcttttttttttttttttttcttttgagacaatcttgctctgtcgcccaggctggagtacaatggcacaatctcagctcactgcaagtccctccgcctcccaggctcatgccattctcgtgcctcagccacccgggtagctgggaatacaggtgcgtgctaccatgtccagctaatttttctatttttagtagagacgggatttcaccatgttggccaagctggtctcaagctcctggcctcaagcgatctgcctgcctcagcctcccaaagtgttgggattacaggcatgagccaccgtgccttgccattttttttttaatagactttattttttaggacagtttaggttcagaacaaaattgagaatgtagagagacttaccatataccccttcccacccacaacacacatacatagcttccctcactatcaatgtgccccaccagagtggtacatttgttccagtgggtgaagctaccttgacgtgtcattatcacccagatgccgtagttcatgttagagttcactcttggtggcgtatattctgtgggttttgacaaatgtgtaatgacatgtctccaccattatagtatcctacaggatagtttcactgccctaaaaatcctccatactctgcctgttcatcactctgcctatttatctctctgccccagatttttaattttgcagtaaacagtttttagaatgttataattgaaaatactttgatagaactatttagtaggtctttcaacataagaaagctgcttccttagtcaaatacttcaaagtattatgtaaatttagttttagagcctcttaaaggcgttctaattggaatgacagattacttggtcaccataattacagtctatatcttaaggggagaaaaattggtccccagcaaggaaagaatactcctatgtctagccagctggacctagagcaggagtagaggccaagtcctcgaacgtctgatactttctatcccagagacacagtgcctgctggggaggcaaattggagcccatcacatcctggccttgttttaaagtatttaggaaattgatattgcttctgtatttctaattcggattcaaaaactcactgcctaaacaaataacaaacccagtaaggaacagaacagactgcaaaaaatccaagatactgagactcaggcaagtgaggacctgcctagggaggatgaaatagtactactgagagggacgtgtggactttaaaggagtactatgcttttggagaagaggcttgtggagaagattccataaattaagtcggtgaagaatagtattttcactgataaatgtttgatggtattttgagattgaaattggagtttcatttgcatatttctgagacatggtgcatctgtttattccgtaggatatatctagattctgatcaaatatgtattaaacttgtttaatatgatcatcagctgttctgtagtgtcacccacgtataattttaacacaatgttattcctaaaggttgaactgattcttctctgatagcaaatctgaaggaaattattctgaaggttaggttttcatgaagaccaatttatcatcttatatttacttgatgatatagtatttaaaatacattctactgtttaagaccagcctgggcaccacatagcaagaccttgtctctagaaagaaaaaaaactagtctaggcatggtgttgcacacctgtagtcccagttacttgggagggtgaagcaggaggattactttgagccccggaagtcgaggcttcagtgagctacagtgctaccacactccagcctgggcaacagagtgagaccttgtctctaaaaaataaaaacaaacaatcctgctgtagaaacacatagttatcctaagtcaaggaaaagcagccactcttttgcaaactagattacaaggggtggaggaaacatccagcgcttgtaagaaaataacacagaatgggctgggcgtggtggctcatgcctgtaaacccagcactttgggagtccgaggcgggcggatcacgaggtcaggagatcgagaccatcctggctaacacggtgaaaccccgtctccactaaaaatacaaaaattagccgggtgtggtggtgggcatctgtagtcccagctacttgggaggctgaggcaggagaatggcgtgaacccgggaggcggaggctgcagtgagctgagatcgggccactgcactctatagtctgggtgacagagcaagactccatctcaaaaaaaaaaaaaaaaaaagcacaaagaatggtggcagagttgattctctgcctccaagagtctttaagatgtgtcacatttgatggtatcctggttaaagggcatttactttagggttttgtgtgtgtgtgtgtgtgtgtgtgtgtgtgtgtgtgtgtgaatagtgtgaagatttgcttttgttttacttatttttgtcaggcctctctatccggagcgtgtgctggaaagcagaccgccttctagcagggacccaggacagtgagatatttgaagtgattgtgcgagagcgagacaagccgatgttgatcctacagggccactgcgagggtgagctctgggctctggccctgcaccccaagaagcctctggctgtgacaggcagcgatgaccgctctgtcaggtgaggccctaccgccgtcacctctctgacttctttgagatggatttatttgcccaaatttgcttattaatagaaggataaagtgcagaacagaaccacacagtttccaaatgaaacgttaagacatttagctcatcaagtgggtttttggcattttgctcctgctgttgtctttcttggctgcatcttaaatcatggaaatgttttttagaagtgaaaaatgcttcaatactggtgatgctggcttccagatctttctaattggagatttatgagctaagcacactcatctatgatgaaaccatattgtcccctcgtgcccttggtcttctgcagggggctgcatggagattttacaattttgttaaaggctctctcattcatcatcattagaacttaaattctgattctcaaaattgtctttagcacatgaataagctattatttctttttaaagtctcagatgaaattttgaacagcatcatcagatgaaagaatcatggggcctgagaaagtagtttactcggagcctccagctttcttgctgtggatcatttttattcttttgagagcccaactgggtaaaatgagcacaatgacttatgattccagtatttttgtacctattaaaggaatgaacatatgacttaaaggtttgggatgaagaatgttaccccaatttcagtattttattacttagtgctgagctttagatatgctcaatgacaaacaggccagaaagagggagagtgtgagaggaacagactgatcaatcgattgaatggctactgcctctgggttttgatagctaatatagaacaatgcaaactggactaaagctcactagttcccacctcccttattttgtgtgtttatgagtcgcatcaaaatacaattagtgtagtcattaattctgttttttccatctctaccaagcacgaaaacctcattgatctaaaaatcagtgagaaaaactaaaacaactgttgttctctccttgtgtgacataaatggttatttggtttatacttcactttactcacttctccttttttgtttttgtctttctgttactcttgaattttcccgcttattcagacacgtgtgaaactcatacccatccagaaagaagtgatttcaaggaagtccttcgcttttatgtttcaacaattgttaagtctcagaattgcaaacatccttgaggagccctgactgccagaatcttattccctttaaccattaatttgactagaatctttaatacatttttacactaagtattaaaatttaggaaggctaaaagtcataatttcttgagaaagatgagcatagtgacttcagagggatagtaccatttactgaggagtgatggtttctttactagtaaagcaagggttacattgcttaaaatagtacaaggttgaaacagcatgagatcatgcatgatggatgaggtattgagaacatactcagcttgaggctgcacagtacaggctgcctaagggaccggtaagctatttactgtgcagctcagcatggaagggatgtgccccatcccttctgatggcagaatgctttgagagaaaccgtgctgcatgtgacttattcttgtctgtctgttgcagagctctaggttctcagtctcccagacactagtttgtgttatcagaagactatattttaaaaagtactaattgatggaagtcagataccacaattgcacccaacatgtaaagccttatttctatcttcagatgtttcattcaggctcactcagtttggggtgcctggatttaggtgttgtggggatgggaatgtttgctgaaagctttgtttgagctgcaattgcccctcgtttgccacttctccagcagtgactgtgcttactggccaggagtcctgtgaggtgtccacccccacaaaagtggacccatcacttgggcgcccagggaagcttgtgaggagcaacagagggggatatcatttgctcttcttcatcttggacacattttcttcctaggaaggccaacaaatgtaacatatatttcaatctgtgtgtgctgaaataactattactggaagcacttttatatatttacatacatatataattatattgattatgtatactgatatgtagatatatagatatatatttatattgatctatatattgagagatatatatttgtgttgatatatatttatattgagaaagagatatattgatacataatttttttttttttttttgagacagggccttgctctgtttcccaggctggagtgtagtagtatgaacatagctaactgcaaccttgaactcctaggctcaagctatcctcctacctcagcctcccaagtagctgggattacaggcatgccccaccacacccagctatttttaaaatcttttttagagatggagtctcaccatgttgctcaggctggtcttgaactcctgggctcaagcaatcttcctgccttggcctcccaaagtgctgggattataggcatgagccactgtgtctggcgcatactttttaaaaagctaataataatggcatcttatcctgtaagtactttttaacatgtatgtgtgatgaacaacccttggtatacataaaggaccacttaatttccaaagtgaaagtaatattttgtatgaagtagtatttttttttttttggagacagggccttgcactgacacccaggctggagtgcggtggcaggatcagccttgaactcctgggcttaagtgatcctcctgcctgtgccccccaagtagctggggctacaggcacacactaccacatccagctaatttttgtattttttgtagagtctgtgtctcattatattgcccaggctattctcgaactcctgggctcaagtgttcctcctgccatggcctcccaaagtgctgggatgacaggcgttgagccatcatgcccagccttaaattttttttttgttctgtgaatctcaaaatctttggaaatgttacctcatttgataattcttgctggtttccttcaaatcatgaaaatgacccaaagatgcactaaaacacctttccacactcgctgacaggccatgataaagggctctggtgtgaagttcctatgtcttttcttgttactgttggtgtggtgagcagcccttcttgccttgggctggccgatgaccatgggaagttggttttgttttgttttgacttcgttcttgtgcctaggctgtggagcctggctgatcatgccttgatcgcccgctgtaacatggaagaggcggttcgcagtgtagctttcagccccgacggatctcagctggccctgggcatgaaggacggctctttcattgttctccgagtcaggcacgtactgatgttgaaaatggtatttagaaatgctctcgtgttaaatgttacaattttcctggtcataatacatgctaggaccttaggaaaaatccatttagccattcaaataggaatactatagatctacgatcccctatctgtaattctgaagtcctaacactctgaaaatacaaaattatttgataatttggcagcacagtctaacccaacagactgatgtgaggctgtttataatctagtaatctcttagtagaaataatcatgtgtcatgtgacttgctgcaaaattattgtgtttaatacagattgctgccccagcccccactggggatgttacatgatacattgtgtatgaacctttctaaaatctaatgaataatgaattcccaagcacatctaattccaagggttttggataaaagattgtgggctttgtagtaagccaagaaaagaggaagaaagaataaagcagcacccaacagcaccagatgtttagaggtgagctttagtaaaagatttcttctacccataattgatactaaaatggaatatttcctatttactgacatcctatatactttttactgaaaaaaattatgacccactcttgtaattcctctgaatgcatttgtcgttctctcgactcacatgttttgtaattatagaaaataaatgcagctataaagtaaatatttcccgctttgcacagagaattctccatagctttgattggagaatggtcttagcacagtttattacactacattctcactaccaaccacacataactcattactgaactagtgggcaacattttctttctctgcttagtgacgtgtgaaaagatggctgagtaccagatttctttttcgatggacttctcaagcttccacactacacacacacacacacacacacacacataaatttccagacacctattttatgacattctagtacaccataatgctattaataaatgatagcaggtatgagcgactgttatgtagaacgattatttgctattctttatgtattcagtttatttggagttgatgaagccatctttactggctcaggggacctgctagttgtcataatcctgtctcacaattgtagggaaaaaacaaccccagtgagctttccagtgtgagcagaaattcttaaaagaatctggtcagaaacaaaacaaaatattccagtgactcactgtattcatgacagtgaaatgttgaatgattacatcacaatttaacatttaaaaaggtaattttcttcagctgcttttttgacttgctctttttgcgacaataggtatcaagcttaacagtcactcgtttcttaaagtataaaaaagatgatttatttatgttaatcttgatacagtctccctttctccatggcgtatttttaaaacaatttgacaaaccccaacttttgaaacaaaaattttagggaaaaataatatatagttaaacatgaaagcaaatgtgcatttctttttaaaattttaaaaatcgatacataatagatacacatattttcagggtacatgtaattgaatacattcatataattcgtgaagatcaaatcagtgtaattgggctatccatcaccttaaatattttttctttatgctagagacatttgaattattttctcccatttggaaatatctgatagattattataacctatagttactccactgatctatcaaacgctggatcttatttcttctatcacactgcagtttgtgcccattaatctacttctcttcatcacaaatatgcacttaattaaattttttgtttttactttggaagcccaaaatatcatttaaacagtttgttattctcctaaaatgccataaattttaagacggagtcttgctctgtcgcccaagctggagtgcagtggtgccatcttgactcactgcaaactctacctcccaggttcacgccattctcctgcctcagcctcccgattagctgggactacaggcgcctgccaccacggccggctaattttttgtatttttcatagagatagggtttcaccttgttatccaggatggtctcaatctcctgacctcgtgatccgtctgcctcggcctcccaaagtgctgggattacaggcgtaagccaccgcgcccggccaatgccataaattttaaataataacattttatatatttactcaaaagttaatcctttaattcctgcaggtttggttctctttcaacacacttctttttctgacacatatattttaaaacttggattttctatttgtagaattgctgcttatcgttttgctttttattcttacagagatatgacagaagtagttcacatcaaagatcgaaaagaagtcattcatgaaatgaaattttctccagatggttcttaccttgcagtgggatccaatgatggcccagtagatgtctatgctgttgcccagaggtataagaaaattggagaatgcagcaagtcccttagtttcatcacgcatattgactggtccttggatagtaaatacttacaaactaatgacggtgcaggagaacgattgttctacagaatgccatgtaagtcatgtggaggccttggatgtttctggaaagcaaaattttgaaccaggtgaaggaaatacaggacaagtgtcatggctcttttagaatttgtacagcaggttttctggtttttgccggaaagcacccccacctcagggcaaggaatgttttctgtcgcaagatcctaaataacagacattcaaaggaaaggtatgagttggaacatgttaaactaaaagttgctgcacaacaagggagatcgtgaatgaaatgtaaagacaaggcatagactaggcataaattcttgccattgttataatggacaaaagatatatatctagaatatataaagaatgcctaaggataagagcaaggaaaaaaaaacattagaaaaatgggcaaatctcacatgaccaataaaagactaggaatcagggaaatgatcattaaaacaacagtaaagtaccattttacactatttagactggcaaaagtctgatggcgagaagaggggaaatggaaaccacatatactgctggtgagaacatgcactaaggcatgtgcgcacaaggatgtttgtgacacaatgcctaaatgtttatcagcatgaggagagttgagttaaatgtggtgtagtcatataatggaatactttaaagaacttgaataaattaaactagagctacttgcatcagtagggatacatctcaaaaatatgctgagcaaacaaaagaaagttgtggaatgatatatacagtgtatggtcatttatataaacttttagcacatgaaaaaattctgtattatttatgaccatatacacatgtagtaaatgttttaacaatgcatgggaatgatacctcattcaggatgttggttaccgctgagaagcagagatgatcttggaaagaataacccaatgaggccaggcatggtggctcatgcctgtaatcctagcacttttggagactgaggcgggtggatcacttgaggtcaggagttcgaaatcaacctggccaacatggtgaagtcccatctctgctaaagatacaaaaaaaaatcagccaggcgcggtggcgggcacctgtatttccagctacttgggaggctaaggcggcagaattgcttgaacccaggaggtggaggttgcagcgagctgagatcgcaccactgcactccagcctgggtgacagagtgagactccatctcaaaataaataaataataaataaatttagaaaaaaagcccaatggattttaactctgaaacattttctttaaaattctgtgataaagacataatgttaggatttgttgaaactgtggtgcaacacttgtacactatagtagtctgtataattttctgtatgctcgaagtatttcatagttttttaaagtagagaaaatctgaaacaattgtagaaccaactttcaggtatttggatgttcatgacctgtttagttcattatccaagtcttttgctttatctgttatttcttctttattcctgatctttgcccatttcattgttcattaatgtgtacctaaaaagttgactaaatggtgataatgcaaaatagtcataatgcttctgtcagtgccttgcacacacaattctgcagcagggttagaaatgaatgaaaatgaactggaggtatcatccgtgggtttcagcttgttgggcaataatactcccatcgtaacacagatatccagggatagtcggctacattatcattaggaaaactggttcctgccagaatagaaaagaatagtctattgaaattttagaaaaaatggccctgggagtattagaaactctgagatcagcttagaactccaacacaacatttcaagatttaagtcttcaaagatttgaggatcatagtccttatttacttggattgttttagtcccagatctttgttcttcataattggaatctcttactggttatttggtgaaatgtgcccattgggattttttaaatgctatttttgtgaccccaccataacttttataagagattcatctgacttacataatactcatttattaacatttagtttgtgtgatgctaaaataaatgtcacaaataagactctgccttatcaaattcttcagtgtaccattgcagaaatatgtatttctttgttttctttgcttgacgttacttcatatattttttctatgtgaaaaaatattaaacacatgtttatcatttgcaataataaaataccatcctgttcaggggtggcatcataatttacttcatcactgtcttattattgggtatttgagcttatttctagtatctttgttggtccagctgttggaattccaaatgcccctgtactggtggaattttctctcctgagttacttcctaggactgtattctccaaggcaagaacactaggtgaaagactgtgttccaactacagacgtttttattttgttgtctctttaatgaagttttacgtaatgctgttacagtctagaattttaaggtgccaatttgataatgcaccagtattatataagggcatttattctcaccagttctttattttgaaaatacttattctgagagagaagttaggtaatatgcttaaatgtcttgattttgaattttaaaattgtgtgtggttaaacactttcccaaatgtatgtatgtttgcttctttgtgtgctctctggggaacatccctgacctgctgtggtgggaactgggtagtgggccatccccatttgggaatatacacagcacaacggtcgggattattttcccgcgtgaattacattttatttcatcataatcttgtagattttcagtgcctagtacttataaatttaaataatattcactaattttttttcattaatctactgagcctgaattttaaagacatcacttctgagcatccttaaattatgaaaaatagaagttcaggatgaacttagccaaagtttttaaaacctggcaaagcgttggtgactaaacatgatgatacatgataaaagtcatttcattaataatacaaagcataataccatctgtatcaaggtaattaagtaattgttagtagcttgagacattacatttagtatgataattttcttaagttttttgatacattcatgtgtttattgggtacatgtgaaattctgtgacattcatagaatgtgtagtgatcaagtcaggatatttagggatgcatcacctgaatatttcatcattttctttttaatgtctgagttttgagtgtgggctttctttaagccacgcaaaaaaagaaaaaatcgcaaatgggataaagagattaaaatatgtagttttctgtatttacaaaagttttcttaaagtttcagatctttataaaaaataaattagaataaactttttatttaaatgtaatgttaatattgattattttcagctgggaagcctttaacaagtaaagaagaaattaaagggattccttgggcctcctggacatgcgtgaaaggccctgaagtgagtggaatttggcccaaatacactgaggttactgacatcaactcagtggatgcgaattacaacagctcagtgctggtgtctggagatgattttggactggttaaattgtttaaatttccttgtctcaagagaggtaaggccaaaagagatgtttcattgcataaagatttactctaaactgtatacagtacaattaaggctgatcttcctgctgtctattccaatgcactgtttattttatcttgtatattcttatttacttttcaacaattttaaatagaatgtgttgatgtcttctacttttgacatcttaagatatgtggttttgcaaatttaagaaagaatttgctaatagagttattaccatattgtgatttgtaagccttgtttcacatttcgaacaagtcatatttatgtaaatattcatagtttatatatagtccgttaaaatgttgtaactaaaattcttttatgattcagagctattgtgcttatacatggaaaagcaaaggaaatcctttcagacataattaaaatctgatcatggttgtggtgataatagtttatggacctctcgtcatagcagtaattttgcaaactagatttacataactggtgaaatttttgagagaagtttgattcaaagcaaccctctttgccctcatgttttgttgttttgttttgttaaaattgtttgacttcagttatgtggcacactcaagcgttgtagaaggtgatgaattaaccatgtaatgacctcttcttcctttgcaagtttaggcaaagcccatattcaggctcttctgagactcctcaactgtgcctgaaaatccgatcttagaaaagtaatcaacagggacatgctactgcctgaaaactctttcacttgaacaatttttagactaagcaaggaaagggattgaaaaatgcaatcagaaagtcattttcagctaactggcagttttgaagcagtgacagttatggtacaaatggaacataaaatgcataacaagacaccatcactgaaacatcacaaaatgaccatccgtttaaaatgtgcaaggcacagaattatctcaacatgcccaattcatactcttctttttccccacaagagccctttgagtaatagggcatatcttgttagattgagtagtatacttgcagggggtaagttaggcctccaagaaagtacctgggaattcagaattgagaagaaacaacattggggtcagtggcaacactactggtctctagtgtcagaacttgggaataaacataactcgatgataattgatatcctatacatcccaagtcttttaaggtgtgcttgggtctggaaaatagcaatggaaatgtggatctattagaaaagaaagcatgtgttagtctattcttacattgctgtaaagaagtacctgagacttggtaatttataaagaatagaggtttaattggctcacggttttgtaggctacacaggaagtatgatgctagcatttgcttggcgtctgggcgaggggtgctcaggaaacttacaatcatggcagaaggtgagggggagaaggtacgtcacaaagccagagcaggagcaagacagagctagagcagggttcctacacttgtgagcaagcagatctcatgaaaatttgttcacttttaggacagcaccaagaggatgatgctaacctattcatgagaaattcacccccataatccagttaccttctaccatgccccccccccgccctctaattctggagattacaattcaacatgaggtttgagcagggacacatgtccaaactatattacagagggtgagtagtgctgtcaaaatgagtcaccgttacataaaaaacagctctttggataatggcacacagagggcatctgcatgaatgaggagagatggacagccagatgacagtatggtgagaagtagcaaaacccacctcagcaacccacagacatatccatgtcctcatagcaaatggacttgtgttctacttttcatgacacatggcttataaatcttgtaatttgcctctgagacattcaggcttttgtgtcctttttgtgccaaaactactggtggggaagtgaataaaagagtgggaattgttgatgggaatactagcagttggtggaatgtgtctgtctgtaatttaggtgacaaggtacaagtattccctgtacattttgaacctgtaaacagccagatatgggcaggtgctgatgaccatgagcagttgtgggaaatgagcaaacattattgttttccattgtgatttttaaaaactcacaaccaagttaatttgacatgtttgcaattatatgtgtataacaatcagttgcacagtaattagacgtaagtgttctgcagttaatgaaaatgactgctactgtactatgtttacgtagccaaaccaatttgtttttctcattttgacagttttcacatcttaaaataattaggatcaatactgacagctttccctgataccacttagactatatcctgtttgaccatcgccacacagacactgaaacgaggtaaaatccaaggccttgctcaatgacaattttccatgtcctaatagccttggtacgcacccctactccaatgggagactcagaggctctccatgttccacctggtgcacccgttccattcctcctttgcattacacctcagcaacccacaaaagtatccatgtcctgatagcaaatggacttgtgttgtacattttatgacacatggcctatggacagcttgaacagccacctcccatgatgagtgtcctgaatgttaagacttgagttgcagaaatcttggatcttagatcttggaggggctggtgctggccttccatatgtcatggataagcttgatgcagtgcagaagcaggaaggccagtgtggctagaacttagtgcatgaggggaagagttgcgtaccgtgacattggagagggtgacagggctgtgtcgtaaagggccccctggccactactagaaatcagagtcgtcttctaagtgcaatgaaaaactatggatggttttacatggagtgatgtgaccaatccaagcttttaagactgttttgatattttgtggaatggttaggaaaagggaggtttcaagtagagaagttattgcaggagtccaggtaagagatggtgtggcttggacaaagatactaggaagagatacagaaaggttggtcgggcttaggaaacagtttcaaggcagagctgagggtcttacagatggactggatatgagaatagaggaaaagaaagtaatcaaggatgacttctaagtttgggacttgagcagtgggttgaatagtggcagcatttacagagctgggaaaatgagaaaaaagatatttgtctctgggagtgcacataaggggaagaggaatgtctcggtctgttttccttgttgtaagttaggggcccgtactgggcatccgggtggacgtggcacagagctgtcagtgctccagggagatgtcagggctggagatgtgcacttggcagtcacgttgacagcactttaaagccatgggggaggaggttgatagagaagacatgagggctgaggcctgagccctcctgtggtgcagaggacaaagggaggtctggtggagtcattcagtgtcccagggaaagccttatgagagacaggtgtggccttcatttattcaagaagtgttcgttaaatgctgtcctacgggatggagataggccagtgatgaaaacaagcacaaatccctgccctcgtggagcttttgttctactgaaggtccacagttaatatacaagaaaatataaacatctgattgtgagaagtgctgtgaagaaaaataaagcaaacagtgggagcagagaatgctggaattgggcagtgcagtgttctaaatgagttggtcaaagaggggcttgctgttgtggtttcatttgacttagaacctgaaggagaatgaaggatccagctgttcagatatctagggagagagcacttcagacagaggaaacagcaaaggcctagaagcagagaaaatgcctagcatgtttagggaatagcaaagagaccaatgtacccagagcagagtgagtgagcggggagagagggcagaaagaaaagatgagagagataaggcctaagtattaatgacattaatgcttttgcaggttctagttccagcttacaaaggctatattaattatctattgctgcataacaaattattctccaaacttaaaagtgtaaatgcacaaacatttattatatcatggtttctgggagtcaaggagtcccaagaagcttagctgggtgattctagttcagggtctctcatgaggttgcagtcatgtgaaggctagactgaggccagaggattcgcttcttccaagatggctcactcatgtggctcttggcaggaggcctcagttcctgctgtgtgagcctctccatagattgctccagtgtgcttatgacgtggcatatagagatccaagaaagacagcaaggcagaatctgcagtaccttttataacctcctcttagatgtcagcttcacttttgccatattctgttcattttgtatcagagaatttgtggacatatttttaaacctctgcaaagagataggctaattgatctgtgaggaaggtataaaggtcaaggaagcaaagaagaggccaacactttaagatctaaagagagttgggaagagcataccctgctccccaattactcaatcatgagccagcatttccagctgaccttagttggagccagtttgactttattacgaaactgatttaggtaactctttgaagtaggcaagtttgcttttgagacccaatgcttcctttcccttctgcagcagaattcccctaatttttctcagagcccctgatataatgaggcttatctggtcagagcatgctctcaaaaaatgtatgagcatgacatgtagcagtaattttcaccttcttacaaatcattgcctctccagtggacatttgaaatttaaacatgtgatagttgaacagatggcctcccccaaccctaataaaagggatttcatttagagaaactgtgagaaatagaaatgtttttgaagagaggttggggtatttgacctcctgaaatctaccatggactttggggttctaggcctccatgtaagatggaccctgcttattactcgagtgccttgatgccgctgtgtactgagcatatgctgatatgctgaaggctttactactgtagttcaaccacaaatatcacttcaagtagctttttctattgcactcactacctggggttagtgttcactgagtaaagcaaccagtttaaggaggaaaaaatgattctccaaactctatgtctacgtgactccaaacaataattttatttccatagaattattttctgtttccctgttaaacaggattgcctgtcttatctttcatttaaataagaatgtgtaagatgttcattctctgtcatttattttcagaatcagtgaagcagtaggcattatttggaacaggttcagatgtgtctttagccacagggcttaaattttacgacctatttttagcttactgcatattggaataattgagatatattttgaagcatttggttatttgttacaatatgtaagacggaacatcgttttcagatatatttaaagattttactcttcaacatgaacagaaggggggttgttttaaactaatgaactcttcttttttcataactaatcctctcaaaaaatattctttcaggagccaaatttagaaagtatgtgggccattctgcacatgtcacaaatgtccgctggtcccatgactttcagtgggtgttgagcacaggaggggctgatcactcagttttccagtggaggtttattccagaaggtgtcagcaacggcatgctggaaactgcaccccaaggtaaacccagcaataatttcttaacatcattttatttttcaataggcatttcaaagaatggtctaacatgtattctataggtaaaggatttaagcaattttggaaaattgattcctgtaatcttaaaattttaagataagaagaaactttaaagattaacatgggtcagttggataattttcttcaaaggaagttgctataccaaatgcaagttgagcaggacgtcagcaacgtgacatctgcaatgtcagaataggaagctcctgacactccctccactcatggacaccaaatacacattgattcgcaggtccattctctctgagagaaagtcatacaagttgagaaactcctacccaccaggcaactgagaaaacatccacattgggtaggtaggaaaagctgaggcacactctggcaggaaccctaccctgcgcactgcttcctgaaatcaggacaggaatccccaccacccaacctctccctgtggagagaatggtttggacctcacacatagtgccctaactctaggttacccgtggactggctcttaattcaccaactctgggagtagagggagttagacatttgggagtctctagaccatgggaaagaagcctcggtttgatacaagtgctcaagccttccagggacttcatcccctggagcagttctgagaaggagcttaaaaaatgcagcccagtttctacctagaaggggtttatgacacatttccggaggctacttggcggcctggcttctaaccaatatgcaacagggatttagaggggcagacacacattaacccagctggcagcctaagaaacagacctctgagcctcctcccatgactcatcccatcagtaactccagatctaataatatactctggaaggagtttgtccacacattgagctccccaacttttatagcttccactcaaggaaatgcatcctaaacctcccacttcggggagcagagggggcaaagtatatgaatgtctgtctagaccatagagaaaggtggcagttttatatggacttgtaggcacttgcagcggcttcttctcttaggagtggtgacgagaaggtgctataagaatgcagctcctcatttctccccagatggggtttatgccatgtgttgaatgcccaacttttacagctacctcccagaggactccatcctaaacctctttgctctgggagcagaagggactaggaatattctagtcttcctatatcacagaacagagatgtggtcttaaatgggtttacaaacacttacaggagtgacatccccttggagcagtgcagaaaaaggttgggaatgtgcagctcccattttttttctccagaaggggcttacagcatacacttccaatgctacttgatggcctgccatcaaatgatttccatcaaggagctaacagggcaaacatataatagccttccagcagccagagctcagcacttcatgagcctttgctctggctcgccccagtgataaatctaagcctacccatacttactggaaaaagtttggtcatacaccaagtgccacaccttctatagctcccacctgtctccttaatgaactagctctggaaattgatggggcttcgcattcctgagtggacttaaaccacagaaaatgaagaggtagaggtacaatgggcccacttcaggagttatctccccaggatcagagggtacagcctaaatgtgagtacaggcatttgtcacagattctctacctggcttagtgcagaaaaagtgagcggtaaatgactgtgctcagcttcactgtgaagatagaaggaattgaaacacatagtccaccctccaacccttctagctacatcaaaagtgtcttgatgtcttcccccctttacagtcttgcggtaccaacaggacatggcacatcttaagctctaggggccaccaaaacagacaatagtctggacaaacacagatttgagaggcaccttaaaaccattggccagtcagattggtgagatccttctcctatacaaggccagtctgacgagatagggagaggttttttgttttttttttttttttaatctaatgcacagaaaccaacacacagtgtcagtgacaatgaagaaatgaaattccagataaacgagcaagacatctccagaaagcaaccccagttaagtagagatatgtgatttacccaacagggaattcaaaataatagtcataaagaccctcactgaggtcaagagagcaatataagaacaaattgagaactttagagatagaaggtgttttttaaaactactcaatgagttttggtacttttgaaatactttctctgaggattggctgagcacgttgactcatgactgtaatcccagcactttgggaggctaaggcgggtggatcacttgaggttaggagtttgaacaccagcctggccaacatggtgaaacaccctgtctctactaaaaatacaaaaattagccaggcaaggtggagcacatctgtaatcccagctacaggggaggctgaggcaggagaattgcttgaaccgggaggtgaaggttgcagtgagccacgattgtgccaccgcactccagcctgggtgacataacatgactccatctctaaaaaaaaaaaaaaaaaaaaaaaaaaactttctctgaagagtactgccactgaactgaaaaattcaatagagaggttcaacagcagactagattaagcagaagaaaggaacagtgaacttggaaagacagattactgggaaccatccaatctgagaaacaaaaagaaaaagagtaaagatagcttagagacttagggtggtccaacaacttacgtgttaccaacatgccaaaaagagaagagagagaaatgggcagaaaacatgttcaaggaaataatggcagaaaaattcccaagcctaggaaagaaaataaagccaaatctaggaagcgcaaaggacacgagtaagatgaatccaaaaagatgtaccccaagaaacatcttaaatgatcaaaagttaaaggcagagcattataagtagtcagggaaaagagaatcatcacacataaggaaacctctataaaaccatcagcagatttcccaaatgcaagttgaaggtctaaggtttacgtgaagaattaacccttgggggataacaggagaggatacatttcagcttccttaggacaattgtaacaggcagtgggtctgttcagtcaggctgcaggggaacagggtaacctttgaaatgtaagtggccttcagaatggggctcaagcagtggttcacggttggggcctatgtgttccaattcagtggacatgtatgtagtcttttcatttatctctgatgtcagcaggcatgagcaggtgataaaatgaaaaattatttgaataaatgttgacaagagttctgtggtggtttgggccatgacaattaccaacacttgggtgggcatggttaaaaggctaaagaggatctgtattgaagtaaatggttgggtttatttttgccctagcctttcactttttaaaacctgcccattttacaaaacaaagcttaaaacccaggtatctgctatctaatagaaatgtgtaaatgaccaacctaggcaatgtggtgaaaccctgtccctacaaataaaatttaaaaattaactgggcatggtggtacgcatctctgtagtcccagctgccaggaggctgaggtgggaggattgcttgagccccggaggaggaggttgtagtgagctgagattgtgccactgcgttccagcctaggagacagaccctgtctcaaaaaaagtataaatgagtttagtctgcctggtgggtggtgtggggaaggaagttggcctagtctgttaatgttcctgaaaggagtgaagggtgggctgaactaaaccaaaaggtgaaagaaagatgttttaacaatttatattaaatgaaaactatggtatagtttttatttactttgctaggataaaaggaaaaatattttagataatttcagttgctcagagtctcagaatttttgcttgtttcttgtgggttgtatctctgcagaaggtggagctgattcctacagtgaagaatctgattcagatttatctgatgtgcccgaactggactctgatattgagcaagaagctcaaatcaattatgatcgccaggtcggtaagcagggagcaatgaaaatttgtaaccccagaaggggatctcattcctggatttggacatagcactaaaaatgactggcacttagacaaagagaattgaggcaaaaacaagaaaaatagtctactttgtgcctttaagtgcaggttaaaaccgacgtgtttacccaatcataccattaaaatttatttcagcagaaagtaattgcaaagtttgaaaactgaacccctggtatttgggctttttgcctccctagcacctaaaactttaaaatatattttgaagaaaaatgtgcaagtaagccataggtcttttttcactttcttagcagattatgaaagcatgtgtttcctttacaaggatggatacccttgaggcatggtggtttgcatgtgagcttgttagcccggtttttctattaacttactgcaaccattatccatttaatcaaagtaattatctacttaaagtaaaagctcaaataaaatgtgtattaatctctccagtcagaaattacctctagtaggaaagctgatcagctgacttcagtttttttggaagttgacatatcattttagcactaaacagtgttaaagcaatccctcagcggaatctgaacacataccaccttgttacagcaataaccatgggggttctctttttctttcttgtcacttaacaaagatatgtgaagcagattctgtacatgaatgtggaatgaataagacttcaaatttcagatacatgaactgtaagtgtcgccaatagagatttaagatataggcctatggcagctaccatgtgttgaaagaagtaaagtaacttgcccatgtccacgttgcttgtcgtattaggataacaatgcttacctaggcttatctccaaagtgcacattctatgcactacttggtttgcctctatataagcattaaattggaatatttttcagcccataatcatcagtcattgattcagagtttgaaaaattgtgttcgtaccaagacagtttaatggtttgggtcagccccatgacgaaatcatcttgactgtgcattgacacattgtattatgcaatatgactactaaaaaggacttgaaaagagattattgtctgtggccatacaaccctgaacgtagtcaatcttgcctgaaaggaaattattaatgtggaaatattatgcaaacactaaacaatattatactctggtatcaggagacaataaaatttaaacacaatacagaatttaggaaaagaaatctttaattgggaagtgtttgtttaataaaatggtgctagtagaagaatgaaaagggaccaggcacagtggctcattcctgtaataccgatgctttgggaggacaaagtgggagcatcacttgagaccaggagcttgagaccagcctagttaacacagtctctgtatctacaaaaaaaaaaaaaaactgctgggcatttgcctgtagtcccagctactcaggaagctgaggtgggaggattgcctgagcccaggagattgagggctacaagccactgtactccagtctgggcaacagagcaagaccctgtctctaagaaaaataaataaaagaatgaaaaggtagacttaaaattcatgcctacgacttaaacagtttgaatatccttaatgtgaaaatctgaattctccaaaatccaaaacttcgtaagtactggtttgatgctcaaaggaaatgtgcattggagcattttgtgttttggttttggatttggaatgctcaaccagtaagtataatgcaaatattccaagatctgaaaaaaatctgaaatccaaaacatttctgatcccaaacatttcagataaggaatactcaacctgtatattctccctgacatgtcactttccaatgctttcaccgatatttgatttacattcacaatattcctgagttattccttaacagggattttttaactcaattttacagatgagaatttgaagcccacagaggttatgagacccatttaaacaatagaaatatcaagactagaattcattgctctaaagtaaatagttggtgagctgatgaaagcatcatgaattaagttgaataataatctttagattctagaagcttggttaattgcatctgtagtagacaaaacagtagtgagagttcttctgaccttttacaaatgatttttgatcaaatcctaaacaggggccttatattttatgatttttaaaagagtttgattaaataaaaacttgatgaagatgagaaattattactagattggatttgattctccacctgttaaatggacatttcttggtagtaaagtataaatacacagtaaacaacagatgggtttttatatgcgtttaaatggtacaatcagcagcacgttttaggtcccaagttagaccaagattgatctttgctctgtatctcagatctgttaagatgcatgaagctatgaagtgaatgtgattccaaagagggatttcaggagaaaattgtcatgactcatgaggtccacatttttcaactgtcagaatcagtaagagatttctggccttagaagaaataaaacaaactattttatttatattttactgatacttaatttcctttaaaatttactgatatattttctagacattaagaaaacagtaacaaatcaagaaagattattttaaaatcccaattatttaaaaaatagttcatattagttttattcattaggaaaaagtaatattcattctcatgtcttaagttttcaaagacattttattgaagcaattaaagattttacaagaatgtcaagatgctgatatttttggaacctgatgaaaggcatctcacccagatgtttctgttgtactttaaggtttacaaagaagatctacctcagctaaagcaacaaagtaaagagaaaaaccacgcagtgcccttcctcaaacgagaaaaggctcctgaggacagcttgaaactccagttcatacacgggtgggtggcctgtcatgggcgcccgtatgtgttcctctgtctctgcctggctgtcaccaaccttagcaccaggcttaagggatcccctcccctcagtgtcgtcctcctcctggctagctcttctctgcaatgtgcacttgtacctgtggttgctattttaagtgtgactctctatccacttccctcgttgatgttctgtggccatcacagtgtgattgtctctagatttctcagacttcatataattccatgacttaaagggtgctgctgctcattgctgctgcacttctttctcatcaccatcttcacttcctctttctcctttcccctaatcccctgctgtgttttgctggctccaccataggacagtattttcttcaaatattttctgcacatgtgcccaacataattttgaattttgtaaaattatatgcacccttgcatattttaagtagacaactaaaactttttaatgtcggtttaaatggctgagaagatactatctgtattatgaatacatcagtcctttaaatggatgcaaaggaacctaaatgccataaatgtttgattctcactatgatcaacttaaaaaatatgtgagaccagacacagtggctcacacctgtaatcccagccctttgggaggctgaggcaggtggattgcttgagcccaggagttcgagacatggtgaaatctcatctctacaaaaaactagccagatgtggtggcgtgtacctctagtcccagctacccaggagggaagttgaggttggggaatcacctgagttggggaggtctaggctgcagtgagctgtgatcttgccagtgcactccagcctggttaacagtgaggccctgtcccaaaaggggaaaaaaaatacctgaagaagtccttctaaaacaggaagctattttacatcattcatatttctacctaagttcacatttccattctaattttcccataaaattttaccctaacataatctttttatgcttgagagtcctttgtcaccatgtcataccctctgcaagaaaaaaaatttttctgtggtcctaagactctaactcagcccaatacaatatccactagccacacacagtcactgagcacttaaaatacggctattctgaaaaaagatgttctgcatgtgtaaaatgcacaccaattttgaagacttactatgaaaagaggaatgtaagatatctcataagtttttatattgattacatgttgatatagtaatatcttagatgtgttttgggtttaaaatgttactgaaataaatttttttttctaatatggcaacaaatttttaattaggaggatcatgttatttttctgttagtgttgctccattaacagtttatttgaattatagttattagtaaagtcgactaaatcaacatgaatatattactaattgtgacatataattattaagcacagaaaaattttgttggaaattattttaatatgatggattggttttcagttgcaagatctgtgcatttatattacttactgttagaatgtaacaaagtttaatattgagtctattctcagttctcatttttgtatagatgtaagcagtgagaaagtttatt

SEQ ID NO: 275 - DNA, 31737 bp, Homo sapiens
ggtaccagctcttcgttgtatttctggtagaatttggctataactccatctgatccagggctttttctgattggtaggttttttattactgatttcaatttcagaatttgatattggtctattcagggtttcaatttcttcctgattcaatcttggggactatgtgtttccaggaattcagccatatcctctagagtttagtttatatgtatggaggtgtttataatagtctctgaggatcttctgcatttctgtgggatagattgtaatgtcacctttgtcatttctgattgtgcttatttagatcttctctcttttttctttattaatctagctagcagtttgctgatcttgtttatcctttcaaaaagccaacttttggtttcattgattctttgaatggaattcagagtctccattttgttcagttctcatctaattttagttatttattttcttctagtaacttagggttttgttcttgtttttctagtttccctgggggtgatgttagatcatgaatttgagatctttctaactttttgaggtggacatttagcactataaactttccttttaacattgcttttgctgcatcccagagattttggtatgttgtgtctctgttttcatttatttcaaataatttcttgatttctgccttaattttgttgtttatccaaaagtaattcagaagcaagtttttaaatttccatgtaattttgtagttttgagagatcttcttggaatcgattttcatttttattctaccacattttgactatggctggtatgatttcaattttttttaatttattgagactgaacatgagattgaacatgtgatcaatcctgaagtatgttccatgtgcagatgagaatatatattctgtggtagatgggtggaatgttctgtagatgtctcttaggtccaattagtcaagtgtcgaatttaagtccagaaatgtctttgttagttttctgccttgatgatctaaggctatcagtggggtaatgaagtcccccactattattgtgtgactgtctgtgtctttttgtaggcctagaagtacttgttttatgaatctgggtgctccaatgctgtgtgggtatatattcaggatagttaagatttctcattgaattgaactttttatccctaatgattctataaaacagttgctactactattcccatttttccccatagataagaaaaattgtggcttagagaaggcaagtcacttgtccaacgtagtaaagtgcatattaggattctcagattaatctgactcttaaccattcccttattctacccccattcaggactctcttatctccaggacaactccctcaactagctcaaacaaggagagttgtttactaaaaaaataccatcgacaatcccttagacatccagtgcagaaaagtaaatactgtaggaccacctgggaaatacagctaagaagccaggaatcaagactattcccaccagctctcatcacctgattctttgtagtgtctactgcaaatttatacaatattttttcaaaatctgggggcttcggtttctataagaccaatgtctgtctatttccaatgtctgaatcaccctctgataggtgtcttattagagaatttatcatatatttgttgatatggaataaagataactctttaatttgatttcctcaactactactaaaaataaaaactaaattctgacttgaattagtctgggattttaacacacagggaaatgttctgttttcatctggtattctcgtatgttgttgaggcagggtctcactcatcactcaggttgcagtgtaatggctcagtcagtcatggctcactctagctttgatctcctagattcaagtgatcctcctatctcagcctcccaaatagctgggactacaggcacatgccaccatgcttggctaattgttttaatttctttttttgtagagacagtgtctcactatgctgcccaggctgagctcaaactcctgagctcaagtgatcttcctacctcagcctcccaaagtgctgggattacaggcatgagccaccatgccccgcctggtatgcttttaaacgtagaagctaatgcaaatcacagagccctataggaagatggtaaatgcacttatcttctcaggtgaatagacttcaataactaccctctcctcatgaaaatttttttaaggttttgcaattggtttatacaacatttctatgtaaaaagtctcccttaccccatttctgtagtttgtctatataaagacagaaagaagagatactgctataattatgcaatctagggccctttccttaaggccagtagttctattacttcagtgctgtattccattaatagaatcacattccagtacaaagcacagagcttggaatagagcccagttctcctgacttccagcctagagcctgttctaaaagttgttcagatgcatgggggatgcagggggtggacaattgggaatgagtggtttgtgtgtgacccaaaacaaaagaacacgaagcatcaaatggtcagcccttttcctttctctccatttaacaccatgatgttacctggcactgtatctggttgtgatataagaacatgatggtttctgagtaaggttctgtgtgtgcatgtatgttctgtaaatatctgtttattgatatgtttcttctactggactgcaaactcacttatagcaatcatggtgcttatttatttttatatctccatcacccagaatatggcctgacatgtaaaaggcatgcaaaaaaaatgtttttgggaggaaggaagccaggaaggaaggaagggtgggaaggagggaaagagggagggctacacaatttgcctcaaatgaaggttctatttaaaagattcaaccaaaaagtgaaagtaaaataaatctgtggctacttgagaaaagtagaaaaactttcttatttgcctgaggagtagaagtcctctgcattcccttctcttttgttccccctttccttccttgtttcaacttactagtttcaaatgatttttaaaaatgaataatgctacatagagaaaagactggagaaaagataacgaaatgctgtaataatagaagttgtcaaaaaagaaaaagaaaatatatttaaaaagacgaaaagtcagaataagcaataaaaagtatacaagtgatagaaaatatgtaatataaagacactaaccatgattcaatattaactacttcaaaatgatctgtcagttgcaatgcatgaattgcattgtcaaaacatttcacacgaagaaaaagaacatgccaatcatggcaggaggaaagagaaaggccaggactaatattgatggtgtgatcattagttcccaaaacaaggaaaggaagtagctgtatgaatgtttctctgagaaaatatgagagattccataaccctaaattgttgcctgtggattataaacagtgattcttggacttgctccgggtctaaaccatctgagagtcatgggacctttctaatctggtagaggcacttgcactccactaggagtcatttggtaagtagcatgaaccaaagattttcctttttgttatgaggaggaaattattgtcatatttctttttcgcttacttcttttcttcctgcaaagtgaaaaaaaaagagtaattattcaacattagaacatctcaggtcagtcagagttccacaggagtatggttgaaactcagtggttagaaacaaccactcagtgattcattcactcaacaaatatttattgagcatctaacatgaactagactctgtgaacacaggaacgaacatgaccaacaaggttcttgtctttgagaagattccattcttgtgggagaggacagataataaaccaagggacagaaaacatcttctctgagattccatccttctcccgccaaccttctcctcctcccttatactccaggcacattggagaacactggccttctttccattcttaaaatatgccaagcccagtcctggctcagggtctgtaccttcgctcttccctctggctggcaagctctgcaaccagatcttcacattgcttcctcctcctcactgaaggctcagccaagatgtcacctctcaaagaagcctccctgatcatcccctaaaataggcctccctcaagctctatccatttctattttattttctttacatctcttactcattgaaactgtgttatttatgtactgacttgttaaattctcagtctctcccactagaatgtcagagccacaacagcatgggttttacctgttttgttcacttctatatctcatgcatttacaacagtactgttagaaatgtccatttacccacatgcctaatgacaaagtatctatagtcagagggcctaatctattatctgcactgtgatatctggtctctctagatggcccctagtgagttggtattcacatcttgtgtagttctctcaccttgaatctggactagccctatggcttacctttgaccaagagaatgcagcataggaaaagctgcatgacctccaactgtctcataggaagccttggagattctaccttggtgttataggacacatggtctggaggatgccagagaacaagttaaaaaaaatccaactgtactgagatggccatgctgtaaggcagccaaagctagccacgtggagcactgcacagacactgaaatgctcagctagccttcagctcttccagccatcccagctgaagcaccagacctgggaatgaaaattccatcttgcacatccagcttagctgagtcttcaaatgacttcaaacccggcctttatctgagtgcaaatgcatgagtgatcacaagtgacaaccattcagctgagcccagtcaatccacagaaccatgagaggtaataataaattattgttttaagccaccaggttttgaggtggttagttgtacaccaacagataactgcaaaatgcagccaccaaagataactctagattcaaacatttctttccccacaaacattgtattcacacctgaaggtccttgggctttctctccaacacactctcctacaagatatgtgtctttgccactaacaaaatttgtttggcacattcactctcctacaaccctaaaagtacccccctgcaagtctggaaaactggatctttgttctcatgagacgactgtaattttggccaagtcactgaactccgtgaaagcttgggctcttctctgaaaaatgatggtggaattttatttttaaattgtgttcagtgtgtggcaggccaaatagaaattaagaaagaacacaaatatattaaacagatacaagtagaagagttttaattgaagcaggagagactgcattgaaatagcagcaggaaataggcccaggagtcagaacacctgagttcaagtgctgggtcctcccctcactagaccaaagagccctggcctcctacagaacccagcatgaaaaccaccatgctggatgatcacagggaccctcccaattcacacatcgtgatctgtaacatttgccatatacaaaataggcatgtactttaaaactctgagatagatattaatgtattgtttctgtggcatcatttattttaattcttaaaaaataacatgaactggaagagttttttttactgcttctgctttctcaattaaccagatttaaattagtgttacaaaactatcctctggcccctggaccagtaagcccttgccatcttgcctattcctctgagcatgagtgctaagcatagtggttgcttcatctctaggaagagaaatagaagatttcaaatatctcaatctgcagtgtcacttggctttggaaatattggcttaaaactactctactaaatttttaaatcttattttcaaagtcctccagcatagaagattccataatctactacagagttccattccaatgtttcatggttatattcattgggaaccttttcttcatattgacataaatcattcaacaaaggtagccattcagataatgcttctcaactttcattcttacaatttttttgaaagtcttagaattaagttcttaattgtcactgtgtgtttctcttctgaacttgccccctttttcctattttcttctttggacactggctttaattgaaaacaggaatggtctgagaagtgttcctggaattcttttacttataaaatatcatgcatagttaagttatcacagagcttccaggtttcatcttgataaggtcattaacatcttctaaaacctatcatcagacaatatgcaaaaacttacaggcatgtgatgatacttacctatacttatattggttaataaataccccaccacatgttttaagttaggtaactataatatttgaccatacattgtgtattagtcgattctcacactgctataaggaattacctgagattgggtaatttataaagaaaagaggtttaatcagccatggttctgtgggcagtgcagacttctgcttctggggaggcctcaggaaacttacaatcatagtgaaaggcaaaggggaagcaagcaccatcttcacatggtgaagcgagagagaggtgagagagagagagagagcgagagagagcgaaaagggggaggtgctacacactttcaaacaaccagatctcatgagaactctatcacaagacagcactaggagggtggtgctacaccattagaaaccaccactatgatccaatcacttcccacctccaacactcgggatcccaattcaacatgagatttgggtggggacacagagccaaaccatatcaccttgcaaccaaatctccactcaagtctccaaacacattatttgtactctgcccccaagagtatgaacagatgcacagtgtatgtgctcaatgttaaggaaggccaatatctgaccaatatcaaacatcaaagctgtttgcatagaagctcccacccaccaaaggtgttatgtctggcatcttctaccaaagtggttttaaaaactagaaaaagtatcagctagaaatcttctttgcttttgccaggcatggtggctcacgcctgtaatcccagcactttgggaggccaaggtgggcagatcaccaggtcaggagttcgagaccagcctggccaatatggtgaaaccccgtctccactaaaaatacaaaaattagctgggcgtggtggtgtgtgcctgtagtcccagctactcgagaggctgaggcaggagaattgcttgaacccaggaggcagaggttgcagtgagctgagatcgtgccactgcactccagcctgggcaacagagcgagactctttctcaaaaaaaaaaaaaaaaaaaaagaaagaaagaaaagaaaagaaatcttctttgcttttaaaaacaagaatttggattcccagagacttagaggaagaaaaataatgtctcttattggtacaatatcaaagggcatcctaaaacatattttaggcataatctttttatcttgtctcctctcacatatcataggcataatcttacatctctattttgtcacatggcaatgacatttcctttattgtttatctgccgtgcctcttgaatactatattccatatattactgtagaatagccccaagaataaacaaattaggcagttgtttaacaatgccttttaaacgtaagcaaacatcagtaggtaaaatattgtagcttacttgctcctttctaattcttccactctaggaaaagactgatattttccctaccagccctgccttccacttcaacctcacctgctccttctcacttaaaaccacaccattggaagtccttataccatgcactaaagaactttaagctattttagggtaactgagtgctctttatttgagccataagcccatgctaagactgctttgaatacttgcccttactcatgcattaaaagagggctgaccatgatttctcaaaagggtaaacatagactactatatgacccagcaagtctactcctaggtatatatccaaaagaaatgaaatcagggactcagacaaacatttgcacacccatgttcatagcagcatcattcacaatagacaaaagctagaaaaaacccaagggtccatcaacagataaacgggcaacccaaatgtggtatatacatgcaatggaatatcatccagccaaaaaaaaatgaaatttggatatatgctatgacatggattgaccttgaaaacattacactgagtgaaacaagccagacacaaaaggaaaaatattgtatgattccactaatgtgaggtacctaaaacagacaaatttatagagacagaaagtaaactagaggctaccagaggctgggaggaggtgagaaagaaagagttattgtttaatgtatttaatgggagtttatgccaaggatgataaaaaaaagttttgggtacagataagtggtgatagttaaataacattgtgaaagtgttgaatgccactgaattatacacttattaaaatgataaatagtaatgttatgtatattttaccacaataaataaattacttagcggggaaaagtcagtctgatctgagctctgtaatgagaagttggagtgcacctgagatctgagagtcctcatccagagtttgggaaattgacaacctcatctctgttccaaacctatccctattctgaggagggtggggatctagaggtgaaggcatcaggaatgtccccaggaagaggcaactatgggcaccaaggagacagccttcaagctttcaggtcacccagagtttaccccatcccacctagcacagctcctatagcaaagcagtcagtggtcaggaaagaaaaagagagagaggcctgactaagccaactcttctggaatttatgtaagctttttcttttacttatttttcaaatgtcacaaacatcaattttggagcaagcaggctacaaaaagatgcttttgttctctcagcctaatgatatatatgtaaaaagagaaggaataagaaaactttggaaagaacttgcacctccaaaatgtttgaagttatttagaaggttaggtgttttacacacacatacaccctacaaactacatacatacatgtacatactatggttgtatagtctttgtaatactcttaaatctaaactttattttaagagaaaaatgaaggacttgcagccccagaacatagttagtcgttttttcccaggcatgtcatgctctactgttgccacttgtaattgttttgaagtcaagtcaggcttccaataataacgtttatattaattattctaattgtcaactactccattgcaaattagaaaaccaccaatacaaatgtcatttgctataacaagtcaatgtttatacaagcttgcccaacctgcagcccagaacagctgtgaatatagcccaatacaaattcataaactgtcttataacatggtgacatttatgcacggattttttttttttttttgagacagggtctcactctgttgcccagactggagtgcagtggtgcatcttggcccaccacaacctccatctcccaggctcaagtgattctcctgcctcagcctcccaaatagctgggattacaagcgcctgcgccacctcacccagctaatttttgtatttttagtagagatggggtttcactaggttggccatgctagtctcgaactcctgacctcaaatgatccacccgcctcggcctcccaaactgctgggattacaggcgtaagccaccgtgcctggcccctgcacagaccttttttaaagctcatcatctatccttagtgttagtatattttatgtgtggcccaagacagttcgtcttcttccaatgtgacccagggaagccaaaagattggacacccctgattgagaacaatgcctggaactttgtagctctcaaaagtttgttcaatgaatgaatgagtgaatgcttccaatacaaaaccttagaacaggcaagtcaaaatgtcaccaaaaggtgggaagaagaggcattcacggtactggttgagtgcatagtaaataaggtacttgcacaactatgggcaacaaagagacggcttgggaattatcaaacaccaattttgattttgatgagaacagtcataacccaatatttgaagattttgatggttgcttcttctttgcccctctaaccaccccccccaccccagaacgatgaagggttaaccaaaacaccaccaaaggcaactacttattacctttgttattcccacataaaaaattgagcagacctattgtttaagcagaagaggcagtccctcaatgaagcaatatcctgtttgaataatttaggatggggcataggccagcccacacagcgcatttgtgtgacagggcgtcccactcagacgtctccatttccggtatctagagccggctgccctctaaaaatccccctgttacagtcgggatagaaaacaaaaagcttaatttaccaggaggctaaacagattgtgccttcttaggcaaatgttccacctgcttggccaattagcttcctctcccgaaagactcgttcaacaggtttcctttttctcttctctgcctcctgggttggggaaagaggctgtcacttcgcttcgaccctccccttccctccctctcggcttttccacagtgggtcggaccaatcgcgcccgctccgacgtgtccaggtccgcggccccgggagcttggcgcggcccggcctggatgcgctgggcggagggtgcaggggagggcacggcgccgcttgcttggcctgcgcacccggacctagaagccgggacgagccggggcagagccaggcgcgcggaagtctgaaggtgccctccagacacggccccgatgactgaactacagcaagatgtggaagacacaaagcctgcgaaagtgctcgggaagagggagagcaaacttggctcagcccagtgagtattctcagctgggacccatccaaggaggtgggaggagcgcagcctaaacttctctgccccgggacgcattttgggtggatgcggatttctggagctcctatatggacaatcttgtggcgcgctctctctgtctctcactctctctctctgtctagatattcagttaaggagatggtttagattgattgaaaagtctactgtaggatttaaacaaattctcttaattcaaaactcactggatgttgggaaaataattttgtagaaaataagcctaaccacattgaagctcaaagtcccaacacagcccttcgtttagaatgaccattttcacaaattcattttagttcagcaaataattgagtatctacttgttcaataacgatgggcaatacaaggataaatgttattttggatctgcccttctggaacttcaagagcagagtggggatgggggaggcacaaatgaatattactgtacttcaagggactttggtgaccattgccacattaaacacacagacaaggtatgataaagagtttagcctataattgagtcttctctacttttaaaatatttatctattttgcagtctttggtaaaattggtttgggaggagaggttgtttttttcctacaaagtggtattttctaagcctactgaagtcacttctaattcagtctatgattttagacactaacccttctgagctctaaaactcttgttctggtatcaggatatgagtaatttaggaaggagggatatgtattatcataaggttatactgatgtgataattccactttgaaatcattttaagttgccaaatttttgtgcttagaaacccggtctaacttctgttttgaacttcataacttacattaattatcactaggctcaaagtcttgttgaagtctgggtgtccccatggacatttcttctaagaggattagaatgacttgctcctcacaatttccctgcgtctgtaactgcacccatgtagacctcatcacctagagccttagcctcctaaataatagtagctggcacttactgagaatgcttactatgtgacagggagtgtgctcaatactttaaatgcattctcacaaagaatgaggcaggtgctattatttccatgttgcagataaaagcactgaagctctgagaagctaagcagctaggcagagtcacaaagttaataaaagagcagccaggattcaagcccaggtctcctaactttacagcatgaacttagaaccactatgctgtacactggttcctctgttccagaatctatgatggccttccatggcctactcttaaaaataggcttctctgccaagattttaagatccttcatgatctggacccacacagaccattgcaacctcacttcctaatactagtcagcatgcacatcttttatagccaaacaatcatactagcagccctatacttaaaggagtgatatgcagcactcccatgttcattgcacattactcacaatagccaagatatgaaatcaacctaagtgtccatcaacagatgaatggataagaaaatgtgctatatacacaagatacgaaatcaatctaagtgtctatcaatggataaagggataagaaaatgtggtatatatacacaatattattcagcctttaaaaagaaagatcatttgtgacatggatgaacctagaggacgtatgttagacaaaataagccaggaatagaaaaacaaacactgcatgttctcacttaagtgtgacatctgaaaaagttgactcaggccaggcagggactgtggctcatgcccataatcccaacactttgggaggccgaggctggaggatcacttgagcccaggaatttaaaaccagcctgggcaacaaagtgagaccctgtctctacagacaaaaaaaaataagttaagcatgatggcgcacacctgtggtcccagctgctcgggaggctgaggtgggagaatctcttgagcccaggcagttgaggctacagtgagccatgttcatgccactacattccagcctggacacagagtgagaccctgtctcaaaactaaaatttaatttaatttaaaaataaatttagaagttggattcatagaaatagagagtagaatggtggtttccaggcgctggaaggtagaaagggtggggaaggagggaatagggagttgatcagagggtacgaagtttcagttaggaggaataagttttgagttctattgcacagcaaggagattagtgaataataatatgttgtatatttcaatataactaagagtaaatttcaaatgtctcaccataaaaaatgataggtaagcaagaccataggtatgttgcttgatttaatcatgccacattgtatacatataccaaaacattaccctgtaccccataaatgtaaacaattatgatttgtcaattaaaaataatattaattttaaaataatttaaaaatatatttcttataaaattcaaaaaaagaagtgatatgcagaaggaataaggaactggtatgccaaacataggagcaaatgaatccccttctgtcttcacttttccttactgctattcctttcccctctctcctctctcttcatctacttctagaaatcaactcaagttttccttcatgtgaagccttccttcattactggccatactcatctcttctttaccagtgctcaccttgtacatatgtggcttccgcctcatagaatttatctgctgttattatgacgattaattaacaattaatgtttattgacagtttagtttgtacaaagtactgtttcaagttgttaacatatattaattcacccactaatccagttgtattagttatctttcctctaaataggttgcagactcagattacatttttccttattgaatttctcagaggacccaaccaacagtcactttcaagtaccatctgttggtgagctggggaagctaagaccccagacccagtagttaagatatatactgtaatacgcttgtagctgacattcagcttgactatgtcaggggaaattctatgtttaaaatttttcttaatcacatttcctatcagtagcggttagaatttctaggtacatttacttgcccgagagctgtggctaatttgttcatctttgtgctagaaggtgaagctgctgatacactcatcaccgaactgcatatttgattaaaaaatacaatgaatccctttctgaccaagaataagtactttagctgtatatttccttttgagatcctaattttctccacttttattacctttttcattctgaattttatgttcccagtactttaatagtcgtagcgtagccagactttttttgacacacatttttgttttccttcaagaggccagaatacccttgctctaacttttgtttgtttgtttgttatttaagttctggggtacctgtgcacaacgtgcaggtttattacataggaatacatgtgccatgttggtttgctgcacccatcaacccatcatttacgttaggtatttctcctaatgcaatccctcccccaaacccctacccttgacacacattttatgaaacacacctttatttcttaaagtttcttctggatctcatttagtaatatccaggttacttttaatgaatttcaacaagtacccaaatacccaaaatgatgctgatatattctgagcaaaagttatcttgattcatgtttcaaataacgaattaaattacatgtaatatcattcaaattgcaatttgaatttttaacatttgaactttaataacttgaggtgtaagaattttagaaatatgtccaactccatacggatgtaggaaaaggatagatgtgggcaacaagaacatttaccttaaaaggaagcgctctggtattatcaataaaggttggttatttttagtatatatttttacttaaaatagtgaattcaagtaaaaataaatgaccgcagtggcaacatctctcatctaaactatccatctttgtgcatggcatgttggagtacttgacaaacagaacacagattgaagttgggaactgatcctgaattagaagcaagagaaataaaggcaaataattgttggacctaactcagtttcttagtgcttacttaattccaaactttgaaagctcccatttagcaaaagaagattatctctctatctatgtatgtgtgtgcatataattttttttttaatttccaggtcatcagatctgacaggctgggtgtggtagctcactataatccagcattttgggaggccgaggcaggtggatcacttgaggccaagagtttgagaccagcctggccaacatggtgaaaccccgtctctactataaatacaaaaattaaccaggcgtgatggttcatgcctgtaatcccaactactagggaggctgaggtgagagacctgggaggcagaggttgcagtgagccaagatcatggatcatgccactgcactccagcctgggcaacataacaagatccagttcacttttcattataaactttggggtaggaaagaatgatgtataacatgttttaacatatattcacccactaatccactaaatatgggccttcaatatatgaaaactcatattttaaaatggtatacatattatatttataaattatattaaacaaattatattaaagtatgacacccaatagaggagtttttaaaaatggagaaaaataaacagtgtgtgttctagtttgaaaggttttgaaaaaaatatatagtgaaccaaatcagctctatgactggaggttaatatctcagaaaatgctgatttatctgggcagtacatgaagtagttaagaatgcaggctctaggaaactagtatttgaattctggctttcctgtctcctacaggtgtgacctggcaagttactcagcacctctaagtctctgtttcatcatctataatggggagtacttaagtcagctatttgatacaggcttgctttgaagtttaaatgggaaatgtaagaacagacacttttcaaaagaagacatatatacagccaacaatcatgaaaaaaagctctacatcactaatcattagcgaaacgcaaatcaaaaccacaatgaaattccatctcacaccagtcaggatggcaattattagaaagtcaaaaaaataacagatgctggcaaggttgcagagaaaaaagaatgcttattcactgttgctgggggtgtaaattagtttgaccatcgtggaagacagtgtggcaattcctcaaatacccaaagacagacataccattcaactcagcaatccctttactgggtatatacccagaggaatataaattgttcttttataaagacacatgcatgtgtatgttcactgcagcactcttcacaatagcaaagacatggaatcaacctaaatgcccatcaatggtagactgcataaagaaaatatggtatatatacaccatggaatactatccagccataaaaacgagatcacatcctttgcagggacatgaatggagctggaggccattatctttagcaaacaaatgcaggaacaaaaaacgaaataccacatgttctcacttataagtgggagctaaatgatgagaacacatggacacacagaggggaacaacacacactgggatctattggagggtggagggtgggaggagggagaaatcaggaaaaataactaatgggtactaggtttaatacctgagtgacaaaataatctgtataacaaacccccatgatacaagtttacctatatgacaaacctgcatatgtacccctgaacttcaatgttaaagaaaaaagtaaaataaaaaagaaatgtacttcacctagtgcctacatattatcagctctctataaactgtagctgtattagacctcactttttaacatctgggacatgctatggggtggaggtgggaggatgacatgaaatgtaattaaactaaatggtcaaacttcaaagaggtcaaatgcttacagtagcctgcaacaatgttccataaagtgaccgtgaggactcttgtgacagcacctgagcatttctttgaatctaaccaggtgtgttggtttttactttatgctaaaaggatctcatgccatgagtattttgtgaccttccagctaatttaaatattgcttactgatttggtgttatacatctgttgtccaatacttctatccatcatccactgattccacattctgcttcctggcactgagctttttactcatggactctcagctttaaactgtttccacttgctaaacttcaacagaactgtcctttaacacctttctaattttttaaatgttcagctttagccactttgcacattttcaaatgtaataaagcaaagatccttgagagaggttcctcctcagccaccttaatgactgcttctttatccttaaagaggagtgttttatccgaagtttgattcgttaccttgagaagagaagcagaaccaacttaaactaaatttccttaagtagactaatttacattccctaagatagacatatgtagccgtcattggtcactccacgtatgtcaaagatttctgtatttataatggacatgatgtcccaagatgcatagtatttgtaacaactttattgagtttttacctcataaaatttacccatttccaggtgtaattccatgactcttagtaacattaccaagtgatgcaccatcaccataacccagtttaagaacattttcatccctccagtgatatccctcaggtacatttattcttaatccttatttcaattcccaaccccagctctaggcaatcactacctactccctatctctatgaatctgccttttctgggtatttcgtagaaatctttgttccataggcttgatttaaagacaattagattagatcttttactaagccttttactctataaatatatgtcttttcacaagaaaaaaagaaaaagaaaagaaagggctttcatgtagcaaaagaaacaagattgtaagcatcttaaagacaggtcagtgccttatactttgtaacaataaacatctgttgaatgttgactaagtgacattcatacttaaggttttgaaaacttcccaaaccacaacatcaaagataactcaggctgtgatacttgggtacttttgtttatgacctcttaaaattttgcaactaatatttattactggtttttttaagtgacagaattggaacataatcttcccatatgggttgatattttttaaagaaatacatgtataaagtcagaaattaaaacaatatagatagatacaaaatgaaaaacggaggccttcatcctgtctcccaccttatagttccttgtctcaaagttaacacttcccaacgttttggtctttttttcttacgctattgtcattttaaggccggaatcaagttttttattgattagttttctttttttttagactatccaactttagccgactataaatgtgttgaacttggcgacttgaagcatctcgtgagattgttatgattaagtgtgatcacacagtatctgcacaccataggagagctcagtaaatggcaggcattactctcaaatactattttttccaagcttctttgcagaatagttatccacccataaaatgaattcatagttttaacagtagtaaacaaacccattagaatatgatcttatggtgatgaccttagcaaggtagacccccagtgttaaacagaggaattgtgactgagccatcctgccaattcattttcttaatctcttctgttcctctcttctagtctggatgatcctagacagaccccctaattagatgaggtagtgatatctgggccaccctctgaacaattcaatagagggcacaatggtgatatgacctgttttaaaagggaagagaccaaggtaagagaagtggaaatgtgaagttggagaaagtgagtaaagagatgaggagaaaatagaagagagttgggaaaagagagagggaaataatactgagttatattgaaaggagaaagaaaaaaaattggctaatttaccattaacctgcataatattcctcttctgccctggaagatattccttcttttctctctgtattctattccatgtcttgtctcaggcaatgagatgaggttttgacatggctcttcttccctaatggggatttttgttttgttttgttttgtttttcaagacagggtctcattctatcacccaggagtgcagtggcgtgatcacagctcactgcagtctcaacctttctgggctcaggtggtcctcccacctcagcctccagagtagctgggactacaggcgtgcaccaccaggcctggctatttttcttattttttgttgagacagggtttcaccatgttactcagactggtcttgaactcctggcttcaagagatttgcccacctcagcctcccaaagtgctgggattacaggcgtgagccaccataaccagccctagtggagatgttgatctgtgtatacatgttggtgttttcttaaagtccatatatatcaggtgtatgattatacccatatttgttgtctttcacattacgcccaacttgtgcagtaagttaaaaaccaggaagaacctcagaaaaacagtatgctaatttttgtgtcctttataataattaagaattatcatctgaaagcagttgtgtttctacaaatgattctgaaagctttagtgtgtattgctgtgaaatgtgtattgtgagttgaattgctatatatcgatagtgatgaaaaactatcaattcatcatgacaacttttattatcactacattgtttctataattcattagaaaataacacctcattagatctatttaatccttaaatattatgcaggttactctgtgtaatatacagtgtggtcctcaaagagcctacatttattgttaagaatatatttcttttcctcccgctctcccttcctcccttaataacaaagttccatagtatataaagttggacttgttttgatgtgaagttggtagatttcttaggtatgttctcgatttgatcaggatcttttctgaaaattttagaaagaatgacagcaccttttctcaaattctaaaatcacaaaatatcagaccttgcatcagaataataaatggtatatgagctataagagaaaagcagtatttgacagttgatgatgaacagagggatttgattgagtactcagctgacatttacaagtacttttgcaccatgggtaccatgctaagtgtcttgaatatcaccaggatgaaacacataaagcctttgccataaggagaatggaatagagaggaaaggaatgttttgttttgagattcgatcttctttcaaagaagaaactaagtagctccagaaaatatatcaaagcttagacaagatgaagtaatatcattgctattcattagacactattcaaagcgcttttacagatatacatataataaggtaggtactatttccatcacattttatatgtaggaggaacacagtgacttgcccaagtcataacagctgttaaagtgttgaagccaaaatagaaaggcaggcagtctaaactgaaccagcttcctaaaatcactgattatacaacctcactagatttacgaagggcaaagatgcagaagacaaagtaactcccattaaagtctgtgcatccctgcgtagctctcttaacttttgtgtgtgtgttttctaatcataaaaggaagatttatttccattctacaattctaacattgaaagaatttctaatgttctgtagaagacaagattagctgtcaattaagcacttgtgctttctctgtattgttaaacacaggtacctctttggatacttgcatatttatctgtgctccagcttagcagtagagaagttcattttttcagttgaagctctacgtcctaattggcacagcagtcattcatggattccaatttttaaaaaccatagatgggttcttctttgcacaagtacagagtgtttctataaagtgatgtgactgatgtgttttaaaagcatgtgaatgttgtgtctttaaaagtagtcaccaaaggaacccaagaacttttccaacaatgcagcaattgcacaaaatctttttgaaattcttcttgtagtgttactttcaaagcctggagccaattcttggaatagtcataaggttggcaaatcttcttcttttgagagtgaattcaggttctgaaaaacaacctggagttacttgaagccaaatttggtgagtaagaatagtttaaatatctttaaaccactctggattagatcattttttatcagaaacaagatgtgactataaaataataagactgagtttctggcaatacttaacaaactaatttctatacatccaattcaacatttattactttgtaaccatattatgaaaatagtaaaattttatagttattattctgtcctaaattcatttgtcagtgtttataatgtactcaggtaggtgttggtatgtcataagtattataaattacttttaaattaaaaattatttttttaaatgtccatgagcttaggcagtgaaagttcagctatcacaatcttcttatactagcttctactctattgtacattatggtaatttgtatagacatcacactttttcaaaccccctccccatattccaaatggcctttctttcactgtctacaagacactattcttgactttcccacatgacaattatccttttttttatttttatttttatttttttttgagatggagtcttactctgtcacccaggctggagtgcagtggtgcgatcttggctcactgcaagctccgcctcccgggtccacaccattcacctgcctcagcctcccgagtagctgggactacaggtgcccgccaccacgcccggctaattttttgtgtttttagtagagacggggtttgaccgtgttagccaggatggtctcgatctcctgaccttgtgatccacccgcctcggcctcccaaagtgctgggcttaggggcatgagccaccgtgcccagccgataattatcaatttttagcattaagctttccatttttgtctggcacctgagagttaacctctgttagctgattggtttactccctgagaagttcctgagcatacctatggacaagcatattctcctgttcttgactttgggtcagaatggactcattagcacagcagtgttacacaaccattttatctaagatctgagtttgacactgtactgttcagtaacttttatgtgctatatcttcgctcttctctaatccaaagtaagtaattcagcaagcagttacctaatgcttactctgtgcagggaatacaaggctaaatgaggtataagtgttgccctttaagagcgtccagtctggggagaggggaatgggatgcatacccacataactaataccatgtgataagaatttcacagtaattaaatgctgtgaggatagagatgtagccaatttgtgttttgtggggtgagattagaggcgctgtttgaagcgaggttgatggacaaggaagaatgtgtctttaactggagggagaaaattatttcaggcagagggaagaacaaggataggatacttgaaagttcaaatgcatgtttttgatgggcacttaggggtctcctgtggcgtgactggctggggctggcaggactcgcagggagagcagaagggggaaggactcagagcccccggttaggtgtcccctcttgctttgctctttccttcttttccggctttgggctctactaccgactctttgaaactttagggaagtcgttctcctctttggtcttcagtttcctcctctgtaaagagagagggctgaatgacctgatttattagatcccttccaacctgaagagtctttgaagaaactgccctacttctctgcacgcttctgtagtttttgtataaagaattctattagactgaacaaaccaaggaaagcctttttaatatgaatagagtccttgctttcttatgtggtttggcctctttatttttttatttccttttctttccctaggtaaacatatacctgtttaaggcaggactgccgctggaacatacctaaactatcctcttacacgtttatagatacatatgagcattcacattgcatcagacaaccctgctttgccacagtgccttctggactggtcatagcagagatgcctaatggggtaacataatttaaacctataatacaaatggagaccaaattcattatcactggagttgcaagcttctctgatatacttaatgtctgaaaataatcaaagattgtacttaaatagagaatacaattttaggttaaaaagcccttttcctcagaaatgaaattggggaatacctaagaggtaccagtttcccatttcaacttaataattatactagcattttaatttactttatattcatttaagtacttatatttacataataattgaatttaatgcacattttttgaggacctactatttttagacattatactgtgttatagttattagcatgtattaggcatgaactgtgtcccctagaacattaggcccggtgcggtgactcacacctataatcccagcactttgggaggccgagatgggaggatcacttgaggccaggagttggaggccagcctgggcaacataacaagaccctgcctctaccacaaataatatagaaattagacgggtgcagtggtacaagcctatagttccagctacttggaaggctgaggtgggaggatcgcttgagcctaggagttcaaagctgttgtgagctcttatcatgccactgcacttcagcctgaggaccctgtctcttaatttaaaaaataacaataataattaggtcaggttcactataatttgagcaatgtcttactatgacattaactatgaatttcaatctactgtgttatgtacaggcatttttaaaagaacagtggggaagaaactagcccagcatggggattgaatgaaggcctcttggaagaaatgatgatatctgagagaaattttgaaggaggaataggagtcagttgcctactctgccaaaaaaagacagaaatcattctaactggaaaaagtagcctaaaataagacacagtgatgtgaaacagccaggtgactattaagaattaatattactagaagataaaatgtataaacttaaagggcagcacataaggcagaagcagtaggatggaggaaggtcccagaggacatgtttttgtgatgagaaggaggtctggtttatctataaggcacaggggccactgacagggtttacccagggatgtgatatagccaggtttgagttttttcgagatattgctagtgacagttgaagatagatttgttggagaacaaagcaggaagcaggaattagctggctgtaaaacaatccaggtgagattgttctggtaggggagaggggagaatgagtttgagaaattctgaggaaataaaattggaaggaccaggtgacggaatggattgacagagcgagaaagccagaatgacttagtttttctcttcagaaaggctgcgtggattatgatgccattgcattatgccatggaaggggatttggggtattaaaaatgagttcccttttttaatagttgtgggatagagtttagagctagcagatagatttggcaattgttggcctataggtaagagttaaaatcatgagagtgggtccaatttcccactaacaagagtaggaaactgaggagagaacctgagaatgattctgtgttgggatgaagatcaaaaaaggaagaggccacaaaaggtgatgggaaataaacagaacggcagagaataaaacaaaacaaaaacaaccaaacaaaataaaacagaggaacagaatcatgaaaaaacaaacaaggaaaggagaatcccaaaagatagtcaccagtggcaagtacaaccaagagcagctactaaattgcccttggcatttggaaatagagaaatcaccagagaacctttccaaataaattttagtagcatgatgagcatgagggccagactctgcaggctgggtaagtgggaaatgaggaagccagcatagcctgtgtagactttactgccatttcacataatccctcactgtcagtgcctggcttgcatcacagctcagattggtgcatactggaatcttctttgtcaatatggcatcctcacgtccccatgtctgcctgtaatctcctatccatcccttgccattctcaccacctgtgcttttcagcctcagagggaagcataagctcttgatgtttccatgttctcctagcccatcagccccttctggacttattttctaggtggctcaggaagctacgtaggctttaagaagtttgtctgagaagtgaagaaaagagagaaaggtaaatggaggagcgaagtcaatgaaaagttttgttttttaggtgagagagagccttgtgagcctgtacataacctcggagaaacagcctgcagagagggagaatatgaaggggcacacccaataagtgacagaacaagcccagaggtgtcagaaatgggcttgaacatgagtaagagagagaccttgccttctgaaagtggaggaatgaatagatgcagtctatgcagatataagtaattagaggtctgggaaagaaatgtgggtgctcttgtataatgacttcaagtttcagttttcttagtgaagtcatgacaaggcccctttcaccaagaaagatgagttgtgtttcatcaggggcttgaggaacatggagagtgtgaaatacgagctgacgaaataaaacaggatgtctaggcaccgttgagggcccagcaaaaggactgatccacaataaagactggtatttttttccctacaatgtggtcagaatcttggtattagaagtttaaaaggctgatttggggattttatctgagtgggcatggcagaacgattagcatgattggaaattgggagtgaacaatcacatatatggcctgagctgcctccagaaataagtccagaagaggttgattgatgaggagaatatggaaacatcaatagctgatgcttttctctgaggctgaaacacacaggtggtgagaatggcaagggatgagaattggaaggataggagattacaggcagatatggggatattagagatgacatattgacaaaacattcctgtacacaaccgtctgagccatgatgcaagcctggtattgaccacgagggattatgtgaaatgtcagtaaaggttgctggtgataaggccattattactggatgccattccacccacatggccattgaagattccatgtggcaaagtcctcaagaaagaagtatgtcagaggttgaatgcaataggaacactaaagacagtggatcaaaagtaacctgcaagaggttggactttccgtatgttgaaatatatagatatttcatatatgtctatatgttgaatatagataaaattgattgtttctttgttttttggttttgctttttttttttttttttggagacagagtcactctgttgcccaggctgaagtgcagtggcatgacctcagctcactgcaacctccacctcctggactcaagtgattctcgtgcatcagtcacccaagtagctgggattacaggcacgtgccaccatgcccaaaaaatttttatatttttgtagagacagggtttcaccatgttcaccaggctgatcttgaactcctgacctcaagtgatcatcctgcctcagcttcccaaagtgctgggattacagacaccgcacctggccaaaattgattgtatttttaaaactcaagggaacaaacacaaaagcaattagaaatagtagtacttagtaagttgactgattatcagaaaaattataaaagtcaatgatacggtttggctgagtccccactcaaatctcatcttgactggagctcccataatccccacatgtcatgggagggagccagtgggaggtaattgaatcatgggagcaggtttttcccatgctgttctcatggtagtgaataagtctcatgagaactgatggttttataaagggtagttcccctgcacacgctctcttgtctgccaccatgtaagacgtgcctttgctcctccttcaccttccaccgtgattgtgaggcctccgcagtcatgtggaacagtgactccattaaaactctttttttttaataaattacccagtctccggtgtttcttcaaagcagtatgaaaatggactaatacagtcaattacctttcttaattaacaataaaaagttaataaaataaattggagaaagagttacagactagcatcaaaaaatataaaatacccagaaatcgatttaataagacttcaagtaaaacaacacacctactaaaggggaaaacttgaataaatggagtttaccttcctcaaaaggaaaacttatgaagtatttcttaaatgtataaggtcactgcaactccaaacaaaatctcagtgactctcttgagaaaacatttcagaatgattctaaacttattctgaaagattgaagcattcagaaatagccaagtcaaatctgagtaataaaaagatagacccatagcttatcatgatgaagctatcctaatgaaggttcagaaggaaatccaaatatatctggaggtattttcaaatccatggggaaaagatggaacaactggttagccatttgggaaaaactagagctggaaatctactccatttcgtaattaaaataagcccctgatcaatcaagtatttaaacacagaaaaaaagaaaccataaaagtactagaagaaaacaaaaactactatataatatggaagtaggaagtcttacaatgcatggaattaaattcagaagttataaagggaaagatggataaatttaaccaaaatgaaaaaattgtgtgacataataaaataaggcattacaaaggaccatcgttctgtattagattaatgaactacacattaacacaatggtatattttatagcattcatgaaaggtggcatttatctctaatcatggggatagaatagtctcaggactatctttgacctttttttaattgcataaaacatgtataaaatgatcctattatacaaaattctatattgacatgtctatttattgaaataggcctggaaaaatgttccctaaaatgttaaaaatgatgatattctctaaattctctaaattatgttttcttattttttgtgtcttttttttcatggtgttggtaatgtttgaattttctagaatgagcgtgtattatggcagaggaaaaaatataaagaacataattatatatttttttcttaagcttaagatcccctactttgtagaggagatagataccttttagacattaaaatactgttagctgggtttatctgaaatgtaacagcatgaagacaactttgtaatgttgtaatcattgtccctcaaattaagtctcacatcaaactgtgaaattaggtacacagatgcatgtaggctctgggctatggattgctccaaactacagactgggtcctcattggcgctgcagaggaaagcaggctgtttgcaactgctttcaggattgactcagggcccccgtcctctactttgtcaccttcacactgtttcagtggttatcttccttgccttttatagcctgaaaactatgcaggtgctcaaaggacaatcagtaggcttccagcctttctcctcttcttcccatattccttctctttatttaggccatttgatcatgccatacaagggagaactataaataataatgctggcacacagcaacatttcacaattaccactgcaatggctagtcctggtataagtttttttttgctaaaacagataatatagttttaattctaataagcagagctcccccaatgaggatttttttaggaatataggaaccagctcgttagaggctcttgataaaatatacttctgaattgcaggcatttcaatggtaaacaggagacagaacctacctgataattgtgacaaccttagatggtcataggattatatctgctgaaatctctgtttcctcgcgttaaaaattttcaaatcaaatcaaaacactttttttctggctaaaacacatttttaagccttgtcttagtgtatttatgcatacctttttatgtaaaaaatctatgaatgttactaaagtctcacaatgtcctaagaaggaattattattcctaatatgcctatgaagatacttcaacaagaaggctaactatcccactgaatactagataaaacaaaagcaaaaacagataggatttgaattcagcacattcacccactaactcctaatctcatcttcacgttcttcacctgaatatttacatcagtcataattttgaagcaaactcattcaaacccctccctaaaatgctttttcttttcttttttttctttttttttttttgtgagatggagtctcactctgccacccaggctggagtgtaatggtgtgatgtgggctcactgcaacctctgcctctcaggttcaagcaattctcctgcctcagcctccctagtagcctgggattacaggcgcccaccaccacacccagctagtttttgtatttttagtagagatggggtttcaccatgttggccaggctagtctcaaactcccaacctcaaatgatccacccgccttggcctcccaaagtgctgggattacaggcgtgagcgaccgcgcctggcctaaaatgcttttcctaatgtgtatttacatgtatgcattataaaacttctagatttttctgtgagccccctgcttaaaatccgtctgtaaatatttccttgaaatctggtctagtttaaggtaccacgtacaactggtgtctctaaattaaatgtggtctctattacttctcttctttaaagattttttttaattaaaatctatgattctacaaagctcattgtagaaaccttgacaaacacagatcatagcaaaaaataaaattaaaaaaaaccagtaatttcatttcccaaagaaaactcagatgtggcccatattttgattttggataatgtatctaactaatcatccaaaatccgaattactaagtatttggaaacttctttcctgaagtagcattacagattgatcattaatggggattgtttttccccattatctatcagtagtactgataaatttaccactctctcccagccctccttagaagattgctggatgaaagtaacaatagtaattgactcgcttcccagttggcccagtagtcttggcttggttgacactcagctcagtagtcccaagattttggtgggtataagatttaagtttttaaaaggtctgaagtagacctaagaagtgcatttttacaagtcccatgcctaaatcgttctgacatagaaagttcttaggccacagtttgagaacctctagtttatggaattcacagactgatctttcagaaactgtatggctcaggcgcacctgaaatgacttttaatggaagagaggaaaattcttcagccttatttatattctcacttctagttttagtaagtgttgtttcagtctgtgtatttctctgcagagccagtgtcctattaactagttaaaagaaaacaggacccctgcagacaaaaccctgaggcttcagagtcctcccacatcctctttcatgtctcccttcctttgtctcttcaaagacatctttgcccagtcaccttctgctctccccacagagatgttgacattgaactttcctggacaatagttttctgtcttttctcagtaaaactggctttctctcagctgtgatggaaagactccatcagtgacttcatgcatgcatgttgttatatgcataacagaaaacaatgagctgtaaaacatacagaggccagctgggtgctgtgggtcatgcctgtaatcccaacactttgggaggctgaggcaggtggatcgcctgaggtcaagagttcgagaccagcctggccaacatagtgaaacgctgtctctactaaaaaataccaaaaattagctggacgtggtggtgggcgcctgtaatcccagctactagggaggctgaggcaggagaatcacttgaacccaggaggcagaggttgcagtgagccaagatcacgccattgcccaccagcctgggcaagaagagtgaaactccatctcaaaaaaaaaaaagagagaggccttccagcactccaccaccactaataccaccaccaccaccagtcctggcctaccttttccaaagaagattattccaagaaaaaaacaggtggagcacactgtggtaggggccagggtggtggcaagagaatttatggaatttaaggacaagagccctttccattatcccccactactgagcaaaccatactgtgcagatgtctgtctgccttaagaacaagctggccttctagcttagaaaagacctttcttccgtgccctctctaaggtaacttgcctatttggtatctgaagccattcaaggagatgttatgaattattgttttgtaaaagccattttttat

SEQ ID NO: 276 - DNA, 175 bp, Homo sapiens
tttttttttttttttttttttttttttttttttttttcttaaaggctttcatttattgaaaaaaaaaaaaaatgcccccaaagccctttgctggtcatgaactgtttcaaaatgggggggtaataaaatgcacctgggtaaaaaaaaaaaaaaaaaaaaaaaagtttttttggcc

SEQ ID NO: 277 - DNA, 516 bp, Homo sapiens
tcagcttctcagtcatttttaataaatgcttacggtttttcttccaaagcaggtgaaaggagaatatataagtaacgatatatttgcggtggctatgcctattccacagcaatcacaaggggtgtccttggggtgggagtgcgcctgggaaagagttggcaatcagtgagtgacagtcctagacttcaaggaccagaaagactaggcagccgtgggggaccagaataagtaggaccacgagagagagtagagagaagcactgtggcaaaagatggagggtctcactagctctttatttcccagaagaaatatcagacacgcagggtagacttctgcattaagcaccgcaggcccagtgccagggaccatagtcttttggggcccatgaaaatgttttgatttgttttaaaatcagaaaaaaataagtaaagctttaggctgaagaacatgttttaatatgcaatattaatatacttttccttatgccaacgcagttgcaaaatcttatttttaata

SEQ ID NO: 278 - DNA, 1777 bp, Homo sapiens
ggctaccctcgccccgcccgcggtcctccgtcggttctctcattagtccacggtctggtcttcagctacccgccttcgtctccgagtttgcgactcgcgggaccggcgtccccggcgcgaagaggctggactcggattcgttgcctgagcaatggctgccatccggaagaaactggtgattgttggtgatggagcctgtggaaagacatgcttgctcatagtcttcagcaaggaccagttcccagaggtgtatgtgcccacagtgtttgagaactatgtggcagatatcgaggtggatggaaagcaggtagagttggctttgtgggacacagctgggcaggaagattatgatcgcctgaggcccctctcctacccagataccgatgttatactgatgtgtttttccatcgacagccctgatagtttagaaaacatcccagaaaagtggaccccagaagtcaagcatttctgtcccaacgtgcccatcatcctggttgggaataagaaggatcttcggaatgatgagcacacaaggcgggagctagccaagatgaagcaggagccggtgaaacctgaagaaggcagagatatggcaaacaggattggcgcttttgggtacatggagtgttcagcaaagaccaaagatggagtgagagaggtttttgaaatggctacgagagctgctctgcaagctagacgtgggaagaaaaaatctggttgccttgtcttgtgaaaccttgctgcaagcacagcccttatgcggttaattttgaagtgctgtttattaatcttagtgtatgattactggcctttttcatttatctataatttacctaagattacaaatcagaagtcatcttgctaccagtatttagaagccaactatgattattaacgatgtccaacccgtctggcccaccagggtccttttgacactgctctaacagccctcctctgcactcccacctgacacaccaggcgctaattcaaggaatttcttaacttcttgcttctttctagaaagagaaacagttggtaacttttgtcaattaggctgtaactactttataactaacatgtcctgccctattatctgtcagctgcaaggtactctggtgagtcaccacttcagggctttactccgtaacagattttgttggcatagctctggggtgggcagttttgaaaatgggctcaaccagaaaagcccaagttcatgcagctgtggcagagttacagttctgtggtttcatgttagttaccttatagttactgtgtaattagtgccacttaatgtatgttaccaaaaataaatatatctacccagactagatgtagtattttgtataattggattctaatactgtcatctcaagaagtgtatggtttaaagaagtgtattggaaataaagtcagatggaaattcattttaaattcccgtttgtcacttttctgataaaagatggccatattaccccttttcggccccatgtatctcagtaccccatggagctgggctaagtaaataggaattggtttcacgcctcaggcaattagacactttggaagatggcataacctgtctcacctggacttaagcgtctggctctaattcacagtgctctttctcctcactgtatccaggttccctcccagaggagccaccagttctcatgggtggcactcagtctctcttctctccagctgactaaactttttttctgtaccagttaatttttccaactactaatagaataaaggcagttttctaaaaaaa

SEQ ID NO: 279 - DNA, 759 bp, Homo sapiens
gcgcgatcctggcgtcccccgacggcctggggccccaatccagaggcctgggtgggaggggaccaagggtgtagtaaggaagcgccttttgctggagggcaacggaccggggcggggagtcgggagaccagagtgggaggaaggcggggagtccaggttccgccccggagccgacttcctcctggtcggcggctgcagcggggtgagcggcggcagcggccggggatcctggagccatggggcgcgcgcgcgacgccatcctggatgcgctggagaacctgaccgccgaggagctcaagaagttcaagctgcaggcggccacgcaccagggctctggagccgcgccagctgggatccaggcccctcctcagtcggcagccaagccaggcctgcactttatagaccagcaccgggctgcgcttatcgcgagggtcacaaacgttgagtggctgctggatgctctgtacgggaaggtcctgacggatgagcagtaccaggcagtgcgggccgagcccaccaacccaagcaagatgcggaagctcttcagtttcacaccagcctggaactggacctgcaaggacttgctcctccaggccctaagggagtcccagtcctacctggtggaggacctggagcggagctgaggctccttcccagcaacactccggtcagcccctggcaatcccaccaaatcatcctgaatctgatctttttatacacaatatacgaaaagccagcttgaaaaaaaaaaaaaaaaaa

SEQ ID NO: 280 - DNA, 25348 bp, Homo sapiens
ctcccaagtctaggccttaagaaattttacagcttctgcctgctctcttctggatgttgcccacagaccaaaaacatagcctactgcaggataagaggccacatggagccaacagcagacacatgagtgaggccaccttggactttcagcttagctgattctccagttcagggatcagcaaactacagcctgtaggccatagcctgcttctgtatggcccttgagctatgaatagctttgggtttttaatagtttataaaaattaaataaaaaagaatatgtgacagagacaaagtctaaaatatttactatctgatcctgttttacagaaaacttggccaacccctgctacagctgaatgtatctatacgagtgagccaaatcaaaaccagagaggaaccacataaccaaccttcagaattatgagaaatattaaattgacatttttgcaagcaactatattttgggagagttcgatctgcagcaatagatgactcaatcacaagctgataaatgctacacaaagaaaaaggagactgcttcaaaggaaataatctcataaaggttttgggcctttttgtctcacttacttcatttaggagaatttcttaccccaatctgttgtccatggctctgctttgcattccagggaagttttggcagctatgagcacatatacctgctggttactcaaaggacattcaaaacattttaaaaatgagtattgaaatacaacttttctaaaattttaagaaacggaatttgtaaaatatagtattaatgccctaaagcattcttccaaataagaggtctattttttcagcatattaatctatctgcagtgaaacctgtctggttttgttattaatggacctccttgacttagtgaggtgaactgtcagcccaggtagggtgaagaatggctgtgataaaggcgtgcagcagggcagcaatcactttaccctctgcaaaggacacagctacctgccaaggctggaaccaggaaaacaatctcaaccataatttagatctgattattataatttagatctgattatttatgcagtgtcaactaagtccttgacttacactgctactatctaaacttacttttgttgtatatccattttgatctctatattcacccctattattttcagagaaccttcaaactatcctaagtaattttgcagaaaaaggctataaggaagaagcagtcaggccaaagagtcagtaaacaaaaagaaatggtgggccacgtttagtcttgatgcaaatgtgtgggttacaatcaggggtggtgctcatggctgagcttggtagtggttaaatacatgatccagacccacttgattttgaggaaaggaccagtacaatcaatactgcacatcttggtaaaaggagtttgaggagatggatctgggagtttaggtcagctatgctcaggtgtacaaaagcaactccctgggactcccatccatacacaggccattgaaacctgacgtgtctctcttacccccattccattccccatcgattccggaagaagaacgggcatttcttctgagacagcaaagaactcctcctaagatttcctctttcctaattagttctgtatgaagtttaacaagaaaatccctccagggccgcctcgaggccatgcactcacgcagtttggaaagacgaccagggaaaaaggatctcaaacaaaaattctagctcgacgtctgccactaagttgtctaattttggccagcatcaactaaaggcatacataacacggccgtgctcggaatgcaaggtgaccgcgaggacccagagggcgcgccatgcgagctcacagggctgggggccgcctgggcccgcgcgtgcagccaggggcttccggccgcggccctggcgcgtggtctgcgcgcgcccggccgtgcgtgcggatgcggggaggctgcgtgtgtgcgcagggagagaacgccggccaccttcccgcttccgagctgggtgcgcgccgagcacaggaggtgagtgagaagggcggccctgcagggtctccgaggcggttgagtcctgccactgggtggagggtatagccaccggacccgcctttcccggaacgcgccgtcctcggaaacgcctagaccccggcagctaggccgggaggcaccgcccactcctctagagcggagcgtggcccaggttgagccgccgcaccgtgggtctcgggtctcggtgacgagcagctgcccgcctccggtgagcgcgggagaaggggcccagtggggcagtgggcgacgcggagggcccaggcccaggccgcggccgcgccgcatccgctggttgtccaccttgccttgccccagggtgcaatacctgccttgcgtcgcccgtgccgctccagccaccgtcaaatccgggtagcgacccggggcgtttgcagcggtgccgaggaagaggacgggaacggtgttacggtattggtgggcccctaacaggcctgcggcgaacgctttcccggagcgctagggaagggccccggcgcagggatgtcggagggattgggaaggaatgtgaaactaagtggggaatgtggagaacgggcggagagagaaggaaatcccacggggctagggctacaggattcctacaggcagtgttaaggaacatacagggcgttttaaaaagattcctagaggtgcaacggagtctcacttttccaagcagtaaggaatgatgccatcctcaagtacgggtagtctttgaattcagtatccgttcgccttcttaatgttggatttaggagggagatttgcagggctttcatgattttgtttcctctgcgttttgcacagattgcctgcgtttaggaggtggctgcgttgtgggaaaagctatcaaggaagaaattgccaaaccatgtctttttttctgttttcagaggtaaggaaaatttgggtttgcagtgttcaactgggaacaagttttttagcttctcccaggaggcttaagcaaaagaagggcgctgaatttgtgctcttagtatgcatgtgtcgatgcctgataaaagcacaaattactgaacgcgtatcagtctggagaacagaatcgtttattactaacagataagagactatgacttttttcccctcatagactaaaatgttcgttcaaatgaatggccattggataactccagacctgaaaataaacactgttgtcaaaacagcatccaggccgggcgcggtggctcacgccagtaattccagcactttgggaggccgaggcgggcagatcacctcaggtcgggagttcgagatcggcttggccaacgtggtgaaaccccgtctctactaaatatacaaaattagctgggtgtggtggcacacacctgaaatcccagttcctcggggggctgaggcaggagaattgctcgaacccgggaggcagaggttgcagtgagccgagattgtgccattgcactccagcctgggcaacagagtgagactccatctccaaaacaaacaaaaaacaaaaaaacagtgtccaagtataatttcagattagagcatgaggtgatttgaaagcgagaagagaggatcaaggcttttccaaaaatgaaaaaagtgttgatatgtaataaatggctccaaaaacaacttgctaagtatacaacattgattttagatgtcataattcctaatgttatgactcatatatatttttttctgttcttctgttcagtagttcacaacagatctgagtgttttaattaagcatggaatacagaaaacaacaaaaaacttaagctttaatttcatctggaattccacaggtaagttcatctacttttaacttataaattatcctaattggttaaaaatgcccataataatgccctttacaaggttttaagtatcgttgatgcagccacgaagtttgttgtatattctagtacgattctttcatcagaggatttgaagaaattcaagagtgaagctctactaagccattttggataatatatttttttcttttttcttgcttgaaaaatagagacaaggccactttatgtttcccaggctggactggaacccctgggctcaaatgatcctcctacctaagcctgcagagtagcgaggacttcaggtgtgtgccacctcacccggctctaataatatatatattttctaaaaaattgaattattaaaataccatggttcttcaggaaaacccaataactataaaaagttaatttggtgggtcatattcaacttcaagttctgactcaattccctttatgcctaagaaaatgctccattgagtactttttctctttcccctttggatggatgatgtctcttcttcttgtgcccagcctccagctttgttccatccaccattggatgatgcaggtagaaccctcttttgggaaatgtctttgtccctttcacaactatatcatgtccagaccaaagaagcttttaacaggatggatcatggttgctcgctatggggtaaactcccactgtgtggtagatagccacatggatggggtcaagcacgtgggatcaaacaggatactcttaatgaccttgcacaacagatacattcaaaagttacagttcatttaacagcaggctgtttggcaaacatctctcttgggactatggacaatgcttttatactaataaaaaattgtatattataaatactgatttgcttttgttaccagtccttttggcatattgtgaattagaggctaggggaagatgagaggatgagctagaaatacggcagtttgtagggggcgcatcagcatggggaaggaagatgaagccacagaacatctgtagggtagggccccaagtgctggaaggttgggagatttggctggggagataacctgcactccttgaatctctgagacattaaggaactaaaagaaagctagagtaggttatcggtttcccaccccatgtatttctgactctgaacacaggtaggtaggtaggatctcattgtctgttgcttctctttctgttgtctgttatctggaactatatttagctattttgtttccagagtttgttttcaagaatggagttaccactttctatgcaaaagcagaatggagtagctgagacagaccctagggccctcaaagaagatatttactatctgccttttatggggaaaaaagtttgcccgcttctgggatagaacatggatttctgctaaactcaagctgtgcattttgaatagtctcataaaagttagaatacacaagtcctcctgttaaaacatttcacaagcctgcagccacctattcctgcagcatgtcatagggctcaaaccatatctcatatctggaattgtatttggctgctattttggttacagactttgtcgttgagaatggagttacgcactttctaagataaaaaattaccgtccagttttatctcttagtattaaatagttcccttctccatactgataacaggctctaaatttatgcctctattgggcactaacacattctgagagtgcaaactcagttccctgctgtggattttggtcactagtttagaaacatttgagctggaaagcctcccccatgttctctaggtgggcctcactcatgatgtttggtgtgaaatgtgtcgttgtgagtcttccaccacgctctgcattgagtgtcggcaacttgaggacagggcttgtctgtctgcttccccactgctgccccaacctctaacacaggtccagaacactgaatgaaggaatgaaataccctcagatgactaaagcaaaggtaattgatggcttaactaagaagaatagtaaagagctgtaatattctcaatttagggtagtaatgggaagaaatgttaactgcagcagctccccgatactcttcctccagtggataaagctctttgtaacaaaacagacacagaaagcccagctttcagggcagtcttgctgctgttctgcctgactttgtgatctttgctctgctccagttttcttagctccctggacccggttgacctgttggctcttcccgctggctgctctatcacgtggtgctctccgactactcaccccgagtgtaaaggtgtgtctgcttctgctgcattctttgctccctgcccaggaatctcaggaggctgtgagattagatgtgaggttggtctctcctggggcactgtgccctggcagaaggagcttggcatttggagttgaagggcttgagtttggattccatgtcttcctctacctgggctgcactgttccctggaaaatgggattgatgttaacacagattttacagtgtcatgaaatgtgctttgtaatttgtagttagaagcactataaacttgtatagtgcccagaagttcactatgcctttaaaaaaaaaaacagccctgctaaaaatcctaacatgtattgcaaattattaagagtgatttttatgttcttattggaatatgcagatagggcagaagcaaaaagaaaattgcggctaaattttccttctaaagtcctgctgcttttgtttgctcctcatttttctcagcccaaacccagaaatccctaaaagattctgcatgccacaacccagaagtctatcagagattcccatatacagggattgttttgcctacaagaaagtagtttgtataacagtatatataatatgtcttacttacatgtgtctttaaaaactcagatgtcttatacctcagcacactgaatgaagcagcaggcttcccttttaatgaagctttaatgaaagacattctcccatacatcttagaagatacctgagggtggtggtgctacaaccagcagagtttcaagggcagaattgggaaatggtaatgagtataggtatttatactcactgtctacctaaaactgtgtgacaactacagagagtggtgctcgaggtgggcttttttcttaaactcagtaaatacttcaaattcattcttaaaaattgaacaatttaaaatatgccaaaatgaaaccttttctatgaactacattttaaacatcaataacaaagttgtggaaccttgtagttagaagggaccttcgacgtttgttagaataacactatctttggtttctcatttgccttctggagtgatacttacatattttattattcaaaataatttgaaagtatctaccatggcacttctaagcttttcttgtctccagaacagaacatccccagatccttcagccacatgtcatgcaatccttatgggagatgataaacccttcaccaaatgagttaccctcttctaacttgttagtgaccctttcaaaatggaactcatatggggctatggaattatgaccccctttgcccagatgcttttccagtttcttgaacctaggagtgtattaggggtgtgtgtgtgtgtgtgtgtgttagagaagggggacacaatctagtattcacttgtagagtttctgttagcactgccattcattcacaagtacttgggagtgcttcctatgtgccaggcactatgctaggtgctggggacacagtgtgcaagaatgaacatcatccctctgctggtagggccagatggtgcctgagaggtatcctagcccaatgtcctaaaattctgttgagaaataactcctcaaattcaatgacttggcctccctgccagaactagaatccttgtttcctgactgcccagttattcctttacttcaccaccttttatcatattggactcatactcagctaaactgtaaggtctgtttaggctgctgttaaaatggccccccatcctgcccttgtgcagctggtttttcgaactctgacataggacaataaatgtgttcccatcaaatttcatcttgctgtctttagctttttctcacctgttaaaaccttttggattgtaattacatcttttaatgaatttgtcattttttttcctgcctacaaaattgaataagcccacgttctttaattagaaatatgaaatgagaaaaggctaaagataggcctgtgatttttttccccagtttgacaaagatgctccagtcaaccttagaacatcagcaggaggacaagtctctggcacttttgtggaacactattcccagagtccagcacaagcccaagaaatgtttcttgaacaaatgactgcatgaaaaatacactggctatgatggatcagccaatttttaagccatctagctactattattactcacattttcccattttgttcagaaggactttaagtgtccagctctctttacagagaagcttgattcttaggtgttacctgcgagttaccttgatcttctattgaagaaccctattgaaaatggggcttaggatagtcaaacagagcattctcagtgaatctcttctagctcctgatggtcattgtgtttgtgtcataagtgttcactaatgtttacagagtctcagcaacttattcagggttatttggaatacagatgcattaacattagtcccttcaggaatttctccattgccaaaaagtgaacttgttggagaggacttgttgaaaactgggtgagcatgatttgcatggaaattggactaaacttccctttctttaaagttcctggtttagccactcgaatagctggcattacaggcatgcaccagtatgcctggctaatttttgtgtttttagtagagatgaggtttcaccatgttgccaggctgctcttgaactcctgacctcaagcagtctgccagccttggcctcccaaagtgctgggattacaggcatgagccaccatgcccggccaaaagtttctcgttgagctctgacaactcttcacctctgaagaagaacagaggtgctgcactgtgaaagtatgaagataccaggccaataggataaaacaaggcaggagggaagcttttgtagtgcagtggctacagactccacttggggtggtgaatatacctgagtttttagtgctgctttgcaggctctgacaccctgactcctgaacaggtgtccaaatttcaagctggttaactgaaagataaatgttataatattggtgcctacttcataagattgcggcagtcatcaaacgaatggaaatataaaacatacttactacagtgccaggaccaagcaaggactattgctaaaattttggagagaggggagtatgaagaaattggatagagtagaaagcaggttctttttaatgtgagcctatttaccctgacagagtaaagcatatttcatttttaagtgttatcaaattaagcagatataccaattgctattcattcattcagtaaataaaatttcacttcctattatatgtccagctgtatgctccaaagtaaggagaaaaatgtaaaccatatcaaatatgcacaatcctcaaagtagcctgacaccacttgaatatcacacgcactacagctggaaaaatttcttgtattttgcagctctcctccagctgctacaagtgcctatggtgagacttttgacagtgtgagtggttcccagaaaaaatgatgttcagttgtagaaagaccatggggcagaaagaaggatcccaggagaggggagcacatgtgcagaggcggaacccagaaatgtgcgtttggctttgtggacctctaccagtagttctttggggctcgtatttgcaggatagcagaacatcaggcactgggagattctaggaaaacagaaaccttggactctaggagaagacttactgatttggaaggagaaggtggatccactaagatttatttgcatgtttaattgtattacagagcatgtcatgccatgtaagacacatttgggagttaggagcaaggtttgtaaaggaaatgtagacaaataatatatgtagaggaagcatatagtgtggactctaataataacagcaataccatctacttagcccttactgtgtgccagccccatcctagatgtttagcacgtattatttcatgtagctctggcaataaacccgcaaagaaggtattattgctcccattttacagataaggtaactgaagcttaaaaaggttgagtaatttgctcaagtggatttcattgcttctcaaacttcagtatgtccacaagccacctgttaaaaatgtttctgattcactaggtctagggtggggcctggggctttgtattcctaatacactcctaggtggtgcccatgcactttgagtggtgagggtctaggcatcacattcaaatcacctgggagctttaaaaatactgccacctggtgctcgctttggcagcacgtatactaaaattactgccacctgagccctgccaccctctgaaactctgatttagttggcctgggatcccgcttggcttccagtatttttcaagttctccaggagattataatgtgccgcaaagtgagaaccactgggttaaagaagaggggaagaaaaagtagtggtcagatggcactggttgtgtttatttctaatataatcaggggagggcctcaaacacaaagcagcagtgagttgtgaaaataattagatgtttaattgacaagtctaattgaatggtagagttttatattgctttatgagttaatgtgtttagtttgaaagggtagtgggggaatttccctcaaagatgtgaattgatagttattttccctttataaggaatatacatgattggtgtaatgatgatttgaattaaacttaatatgcacaggacctttttttaggcaattaagatttccactccctttgcagtattttatgtagaagaaaagttagaatgttgcaaaactgacagtagtttggtaattatctataatagttagcatatggatgatcctgactctagcgtgcttggacctaaaatttaactgaaatttgtttcttgtttttttggaccttttaaaatgcacatgatcagaatcagcatagcctattacaataaggttttgttattagaagacagctgaagaaaaacataatcaacaaattcaggttacttttggattcagcttattcttaggaatatttactaagtggataaaagtacattaccaaatcatttgcaaagtatgcaaatattacagagagcctactatgtgttagacactggacatatagcagtgaataagtggggtcaggttttccctctctccaatcttatattcttttgaagggaatagacaataaacaaatagaaatagatttttaaaagtctagacagggttaaatgctgagaaggtgttaggtttaagtcccagctgaggtccaacaaggtgttaggtttgagtcccagttgaggtccgaggggagtgggtggatgggcgaattgctgaaagaacactcggggggctttaggcaggtgaaatgtagttttattcagcagctttttaatcagcagcttccttacactaactgtttctcacagtttctttatcttggctgtttgcttcagctttgtggctcctcttatgagcctgctcctgctgcccccagccttgcagctgcactccctggcctatactaccagggttagcagcttaattttttccctctgggcataagtccccacttcccgccttcaaggcaatccactcttccttacaggggtcagtagcattactctctctgggcattagtgcacctccaagccatgtcaagccaacccaaaccccatgggcagcatcagcagggcagttataccttttacaaacaatagcaactcaaagccaagtataaacttacaaagacaggttatctaacaagtgaagtatgcacctgtgccctaaacttgctaagtcactttggcccagatattcgccttagcctattccttaaccaaagcacattcatatactttatggaagggaataatgagggatgtgatagaaaataagtgctgggggaactacttgagataaggggtcagggaaggactctcctaagtgacactgtgctgagatgtgaggcatgagaaggagccagcctttccaacaaccagctttttggttggaggggcagagtaagtgcaggctctgcaagagaggaaaatagttgacatattcagggataagaatgggagtcaggccgggtttggtggcccacatctataatgccagcactttgggaggctgcggtgggaggattgcttgagtccaggagttcgagaccagcttgggtaacatagcaagacccccatctctatatatttatatattttttaattaaaagattaaaagaataaaaaagaacggaagccattgtggttgaaataggattgggagggagtagttgtagcagatgaaagaggggcttatataaacccatggagccagaagacttgacagatcttcataaaaaatgtgaacgttgttgcccggcattgtggcaaatgcctgtggtcctggctactggggtggatcacttgaggccaggagtttgagtctgcagtgcaaaataattgtgcctgtgaatggccactgctgtccagcctgggaaacatagcaagacacatctctaaatttttttttaatgttaatattgttatttttaagcttttattgtctctgtgctcttctggcattccctaaattttctctaatgaacatatattacatttgaaattagaataattactttttaaataattacatttgatttctttttgcaggaaatagccaacatttttgcaccccaggaaagagtttcaggttattttggcttaaataattgtgccattgtagtatctctgtttgtctgttttcctggaatctttgcatttaaacactgatacctccatttattttctagtgacgtccagtatgtttttggtgttaaataaaaaggtgtatatctgcatgaacaattagttactgttcttgttaaaaatttgtatttcaggttttaagggtaggaattttgagtcttccttgtgaaaatgataaggctgtgatgctgccatactgtttatatcaaagttcaatggttgcaagaaattaaaactcaaagcagctctggtcagaagagctccttagcataggaagcatagtgagcaggcagcacactccctgggatctagcagccaagaatgtgagatctggagtcttgtttgagtttgtctctaccacttacaacactggaaactgataaccttttttatctttggaggttttctgagcttttctagtatttgagatgttttttcagctgctgcagatcaacccctaaatcaacaagtaattactggtggcttgctgttcacccagcattgcactaagttggtgggatagataagatactgtttgcttaatggaaattgcttatagttggcaaattcatatgtagttaatataagcacaagtttatcttaaaattttttttttttatctatggggtctcactgttccctcaggttggtcttgaactcctggcctccagcgatcctcccgccttagcctcctaaagtcctgggattataggtgtgaaccacagtgcctggccacaagtttatcttttagaaaatggaaattatttttaagttataatttctttcttgacagtgatgtgtggcatttaagaagtcagtaataaaataatagtgtacttccctgttggggcttttcatattgttttctattcgtcaatattgttgattcttctctccgtccctcccctgggacatgggatttagaacagtgtcggggtccttgtagcccactgctcagctgtcctaaggaggcaggccagctgccctgtgctctcactatcaggaaatgagccaatccgagatctctggccagtttgatttctatgatacacacatgctatgaacacagaggccacttcaattgagcccttatttatctacatgcctgagtatcgttttaaaaatatttttattgattgataagtgtacatatttataaagtacatgtgatattttgatacatgcataaatgtgtaatggtcaaatcagaaattcaggatatctataacctcaaaaatttatcatttctttatgttgggaatattcagaaaccattaagtgctcttggtcctggaccaggccctgtgctgactggttaatccaagttctttccattaaacctcacaataattagttttgtgatgcctgatttatagctgaaaaatgaaacttttggcctggtgcggtggctcacgtctgtaatcccagcactttgggaggccgaggcgggtggatcacaaggtcaggagatcgagaccatcctggctaacatggtgaaaccccatgtctactaaaaatacaaaaaattagccgggcgtggtggagcacctgtagtcccagctactcaggcggctgaggcaggagaatggtgtgaacccgggaggcgcagtgagccgagattgcaccactgcactccagcctgggcgacagagcgagactccatctcaaaaaaaaaaaaaaaaaaaaagaaaaatgaaacttttgagaaggtaactaacatgcctaaggtcatacaactagtcattgttgcagtcaagatttagggtggattggctctgatatccaaagcatttttattatgcttttttcctgtttgttttaataaacttaatatacaaagaaaactgtaaatattagagaacacctatatttccatcgccctgaattagcagctgttaattacagtacagtatttatgaccagtgtttttttccccctttaaccacatgttcctttcattcttcctgctgataggtgtggtatgttttcctgtagtcccattagaaaaaaatcattatttatacgtagttgcttctaaaggttcatcacttcttgtgtgtagttttagaatttttataaatgataatttatacatatatcattatgtaacttgtttatactcaacgttttatttctgagagttaaattgatgttctgtatacaaatccaattcatttagctatcatataggattccattggaagacataccaacttttatttattatcttatggacatatatttatggatttgattgctttcttgtgatgttccttagcttttctttctatcctctgtatttcttgtaaaatttgattagattccagttaaacattacattgtatctcattaggagatacataataggtgtttgttccatcatttatgatgttacgattaattattgggttagaatggtgacaccctgatcctccaatgtaaagtttatattttttcagttcttgcaactaaaaagtaatcttcgtggtgttactttggcatcatacagatagccaattgtccatcaaccttttatttattatcaaaactctgatgtataatcatcatcagtaatttcatgaaagattgcaaaatgacagttttcttattctgtcattccatctatagtagtctctgcttatccatgggggctgtgttcaacagcctgtcccccaaacatgcctgaaaccatgatagtaccacaccctacccaaagaatgccaaggtcaccttttcacttaaaggaagcactttgagcttctctttgacctatctgaagtgtcagcatcctacttttctgccttggggccattattaggtaaaataagggtgacttgcacacaagtactgagataccatgacagtgaatctggtaactgagggctcctatgtgactaacaggtgggtagcatatatagtgtggatacgctgggaagagggaggattcatgttctacctgagacagagaaggatggtgcgagattttgtcatattactcagaacagtgcgcgatttaaagcttatgaattgtttatttctggaatttttcacttaatatttccagactgtagttgactgtggataactgaaactatgggccaggaaactgcaggggtaatttctagacatttctaattggcatttttcttttaaaaatttttaaattatttatttatttatttttgaaacggtcacgctttgtcacccaggctacagtgcagtggcacaatcacagctcactgcagcccggacctcccacacccaaaccatccttctgcctcagcctcccgggtagctgggaccacaggctcatgccaccatgcctggctaattttattattcttttgtagagacagggtctcactatgttgcccaggctggttttgaactcctggtctcaagtgatcctcccaccttagcctcccaaagcattaggattacaggtgtgagccatgacacccagcctataagtggcatttttctataaagaagagctttttctcttcaattagagctatttgcttcctctgaactatagatgattgattctttaaagcaggaaataaaaaatgctgtctttcctccatcatcccagtaattttcaagtaagagattggtatagtagctaccgagttgaaacattttacattgctcatgtgcagtgcagatatggtgttctctttaaatttatggatgaaacaaattgtgtatataaggattttgagcttctaaacaattttttttttttttaaagtagagatggggtttcaccgtgttagccaggatggtcttaatctcctgacctcgtgatccacccaccttgggcttctaaacaaatttttaagaaattttatggtttttaaattttttaagtgttttccatattttttgcaattgatttataattatgctgtggttagagaatgtagcctgtattattgtttttaaaattgttgagaaggcttgtattacctaatattattagttttctttttaaatgtgttatgttgtcttaaaaatgaatgtttctattctttttattggatgaaaggtactaaatgtttcatttgatcaagattaataatattatttgaaacattcatatccttttttatctgcttgatgtatcagttacttagatgtattaaaaatctcccattaggattataagttttcccatttatacccatactcttcaggttttgctttatatattttgatactgtgtttttatggttatagagcttcatgattgttaaattatctttttggatggtttcttcttacagagctttatgataaagtatctttttggatggtttcttctgttagtaataacatctcctttgtcccttattaatgatgtttgtttatttattttgagacagtcttgctgctctgttgcccaggctggagtacagtggcaggatctcagctcactgcaatctccgtctctcaggtttaagcagttctcctgcctcagcctcccaagtaggtgggactacaggtgcgcaccaccatgcctggctaatttttgtgtttttagtagagatggggttttgccatgttggccaggttggtcctgaactcctgacatcaggtgatccgcctgccttggcctcccaaagttctggaattacaggcatgagccaccatgcccagcctgagagtcttttttttttagtagataagtttacatttacatttaccttaattaacagcacatttatatttattcctgccatcatcttttgcattttgtgtttgcatgcattttttctttttatttcccgttttcctaccttatattgaatagacagataacttaatttgtgtcttctatttctcaatcaatttggaagatagtgttctatatttgttctttcagtgatcaatgtaaaggttaatgtacattcttaaatgaagtttttagcaaaatgtgaaggtttattcatatctctttgttaaaatatactaagaatgttagcatattttacttttcctatgaaacatctttttgtagccatcatgtcatttttacctagtattttagttaacattttttaaccacatgaaaaaattttttgcccctccctccttttcaggataatctattttgacagtaagaatcattttagagaacacaaatagaatggaaatgatgccaagggtagaaccacagctgataataacagcttctgtttgttgaatacctaacacaggccagaagttttgcatatattatcactaatttgcactatattaatatcttcaatatagagacaggaaactgaggcttcaagagatacataacatacccattcatcctggttggtaaaggacagagctggagagtggactttggtggctggctttggagccacctgtgttgtaggtgacctagtctgttctggccagttctttagagtccgttccttgcttttggactagatagtttctcctctttttgctgctgctttattttattcatgggtccataaatgatagacatcataaccatagtcacattctcacatttagaaactatggcttatagaatgtgcaaaaaataacttttataataagatttgccattttaagttcttcccattattgaagagtagtagggcccccatcatccatatgcaattataaatggcacctcttacaacacttgccttctgtttttccaaaatctgttgaaatatgctgatttgttagaatgagatatttgttgtcataaatgtacaagtcgttagtggctgagttgtaaatggttccctcaagggttgcgtagtgcccagtagccaggtgaggagaaaacgtataaaggcagtgttaattactttcataattcttgctctcaaactattccatttcaggtttttttctgggattggcagtgtatggcaagtaaaggggataggggaggataggaggtgggtggacagatctatattttatccttttacaaatggagatagcatatcaagcctcagtgtccattgcactcctgctgtaggcctccctttgtcttgcactttgactcctgagagaaaaattgtttttgccaacaaggtcatagaatgtaagtggagaggcaagacacatatacgtggaaccaaactggagagagtttgctaaaacattacattgcgttgtgtgggttaaaatatggaaagcattacatatagaaaagataattgtggtgagacgtaatcagggcaggtaagagatgaccagatgaagaggacaaggagccttgaaatcctgttattttcatatgtattaagagacagaggagctgtatgtccagagaccctaaagttgacccaaggtagaacccttggtagactagccttcccataaggacattaatgtctgtcctccatagttaattccagctttccaagaaccctcccccatataattgtgggtaaaagggcacctgccagcagcctcctcagcccacccttcctcatgttgttcatctgtcccttatgctaaagttccttagcatttgatgtaaacagtgtgtactgcactgtgctgccatgtttatacgttgtcttgggatttcttctttctcccgtctcctacttcctttggtctccttagtgcctggtctttggaagcagatgtccagtaaatatacatacatgaatgcccttagactgaagtctatgctcatggtgcaaggaaagctctatggaatcccgaattataaaccaccctctgccttgagatcaggaacagagctgtcacttcacaatctgaatgttctgtgcctcctcttgtctcagctggagcttctgtgtaaaagcaagtgttttaggagtttccatcccatgattctgattgggtgtgtgatttctgaagaggttggaatgggaaatgtgaaaacttaatactaaggacgggcctttgatttaaacagttgctatgcagactgagcattgagtttaaccaatgaggtaaaaggaggggagaggtggtgtttggggcaggtaaaagctgtttcatagtcagtgtttgaaaactcaagagagatgatcctatttgtgtctggaggacttgcctttcaggtgaagaatctctgccttatcccacatcagcagtcactaagaatagaataatgatcactatagggtttttcttatccagatttgctagaatccgtatcagaacacacagctgagaaagacccttcgtttatttgggcatgtggctagtaacatccccttgaattaaatccttctttttttatagttataaagaggagatacattttatttatttgtttttatggtagatttattttttaacccatcattacccatctctttctgtccctatcatatctgcacctaggatagaattatatttaacagtaaactgttaatttaggtagagtaggataactactacaaaataatcaaaggatatgttttaaccttggtcttgatgtaagaagctaaaatagatttttggttattggtttctatttgcttacagttaaatgaagtagattcaagtcaggattttttgttttactctggagattctgttctcctactctttctccttgagtagatagtcagatgtcttttgaaaatgtgttttcggtgtggaatattaacccaatctttgataactcttccagaaccttcggctcgcgtgcttctgagctgctgtggatggcctcggctctctggactgtccttccgagtaggatgtcactgagatccctcaaatggagcctcctgctgctgtcactcctgagtttctttgtgatgtggtacctcagccttccccactacaatgtgatagaacgcgtgaactggatgtacttctatgagtatgagccgatttacagacaagactttcacttcacacttcgagagcattcaaactgctctcatcaaaatccatttctggtcattctggtgacctcccacccttcagatgtgaaagccaggcaggccattagagttacttggggtgaaaaaaagtcttggtggggatatgaggttcttacatttttcttattaggccaagaggctgaaaaggaagacaaaatgttggcattgtccttagaggatgaacaccttctttatggtgacataatccgacaagattttttagacacatataataacctgaccttgaaaaccattatggcattcaggtgggtaactgagttttgccccaatgccaagtacgtaatgaagacagacactgatgttttcatcaatactggcaatttagtgaagtatcttttaaacctaaaccactcagagaagtttttcacaggttatcctctaattgataattattcctatagaggattttaccaaaaaacccatatttcttaccaggagtatcctttcaaggtgttccctccatactgcagtgggttgggttatataatgtccagagatttggtgccaaggatctatgaaatgatgggtcacgtaaaacccatcaagtttgaagatgtttatgtcgggatctgtttgaatttattaaaagtgaacattcatattccagaagacacaaatcttttctttctatatagaatccatttggatgtctgtcaactgagacgtgtgattgcagcccatggcttttcttccaaggagatcatcactttttggcaggtcatgctaaggaacaccacatgccattattaacttcacattctacaaaaagcctagaaggacaggatactttgtggaaagtgttaaataaagtaggtactgtggaaaattcatggggaggtcagtgtgctggcttacactgaactgaaactcatgaaaaacccagactggagactggagggttacacttgtgatttattagtcaggcccttcaaagatgatatgtggaggaattaaatataaaggaattggaggtttttgctaaagaaattaataggaccaaacaatttggacatgtcattctgtagactagaatttcttaaaagggtgttactgagttataagctcactaggctgtaaaaacaaaacaatgtagagttttatttattgaacaatgtagtcacttgaaggttttgtgtatatcttatgtggattaccaatttaaaaatatatgtagttctgtgtcaaaaaacttcttcactgaagttatactgaacaaaattttacctgtttttggtcatttataaagtacttcaagatgttgcagtatttcacagttattattatttaaaattacttcaactttgtgtttttaaatgttttgacgatttcaatacaagataaaaaggatagtgaatcattctttacatgcaaacattttccagttacttaactgatcagtttattattgatacatcactccattaatgtaaagtcataggtcattattgcatatcagtaatctcttggactttgttaaatattttactgtggtaatatagagaagaattaaagcaagaaaatctgaagtattgtcttgtttttaaaaaatacagttcctagtgtttttagaagtcacttaatttgtctcatttttccacctggaaattaggaataatgtagaatgcaaggcagtaatttccttttggaaaggactctgaaggcagaaaagaagggagagaacctcatgggcagaatattataaaaagagtgtcatattccagcatttgaattggaaagagaagagtgaagatccaagttgcattattaatctgccctgtgttttttccttttaacaatcagtttgagctgctgctgttatgagtttctcatcaagatgaaagccctaatatgtaaagtcaaatccgatttaaattttgtgcttttatagaaagaaatttcttcatagacgtggtgatatatcatttgttggacctgctaatagtaggtcaaaggggagcactccttgccccctgttcctgggtttatgcagttttctttttagagtttatatagggcaagtggttctttttctctgaattacaggatggaaaaaggtcatatcctttgtcaggaaatataaacttgaaagtatgtagtcagctcttgtaatactcatatttatgattgtcctatatgaaaaacaacttcagttaaaactataatgtgtgattctgtataacaaggtgatgtctgtttcccagggctcagacctaatccagttataataaaatcaattaaatgaaatattctatagaatcgatctatgcccttgttaatctccatccatataggagtcacgttctttaagacagatggtggtagttatttttgtggcatggttagatttgactggttttgcagaagattacagttatgtactgcataatgacatatacaatagtggtcccataaaattataatggagcagaaaatctattgcctcatgatgttttagccgttttaatgtcatagcctagtgcattactcacgtgtctgtggagatgctggtgtaaacaaacctactacactgccagttgtataaaagtacagcacattcagttatgtacagtatgtaatactgataatgacaataaatgacaccggtttgtgtatttactttttataattagagtgttctattcctacttattaaaaaaatgtttaatagagccttgggcaggtccttcaggaggtattccagaagaaagcattgttatcataggagatgacagctccattcatgctatttctcctgaagaccttccagtgagacaagatgtggtgatagaagacagtgatactgatgatcctgaccctgtgggcctaggctaatgtgtgtgtttgtgtcttaagtttttaacaaagtttaaaaagtagaaaaataaagtttaaaataggaaaaaacttacagaataaggatataaagatatttttgtgcagttttacaagatgtttgtgttttaaatttaagctaagtgtcaaaaaactttgacaaaagagtcaaagtttgaaagtttgtaaagttaagttacggtgagttaaggttaattactgaagaaagaaaattgttaaatgaatttagtgtggcctactttaaatgtgccatgtttgtaaagtctacagtagtgcacagtaatgtttgaggccttcacattcacccaccactcacttagtgactcacacagagcaacttccacccctgcaagctctattaatggtaagtgccctccctatacaggtgtactattttttatcttttatactgtttggttttttttactgtgctttttctattttagatacaccagtaccattgtgtgacagtttccaacagtaagtattcagtacagtaacattctgtacaggtttatagcctagaagcgataggctctaccatgtagcctaggtgtatagtaggctatgccatctacgtttgtgtaagtacactctaatgtttgcacaacgacaaaatcacctatttctcagaatgtatctccattgctaagtgccacatttctgtatatcgatgtttgggaagctaactcaaaacatttctagagagaacttttaacataaaaaataattccctttcacttttagaaaagaccaaaaaacaaaaaaaaaacaaacaagtttcagaagattgtttcttttgaactgaagattggtgcctaaaagaacctacaaagttaaatgattaggaaaacattaagagattgggtcattatattttttgttttcaactatattaagctttcaggaagtaaatattagctgtgttattaaaatcatgacctggtgtttaaccaaatcagcagctttaaaaattttaactcatataacaacgtttaatactggagcttatccttgggctgatttggtcccatctgccttagccctgccatccccatagtttcacacaccctctgcctcacttgctttccttgtctgcaggtgttgagtttgtgacttttagcacattagttagctttgctaagggtcacaaatgctacagtaacgcccaaatctcagacttgatgacaaccaatgttttcactcagttgcatggcagtggttggctgcaaccctgctctatgtctttttcattccaggatccaggctgatgggcagcccgtttggaacatgctgttcttatagaaggaaattaaaaagctggtggaagcacagtggcatatattaatacatccactggctgagatgaatcccttgccaagcccagtgtcactgaggtggggaagtatatttctcttgcaggaagtaactgcaagtgatgttgcagcatgcaggaatgtattgttccacagaatggggaatgaaaaactgagtgcagtcgtactgtaagctgccacactcagtgtctgaaagggagagggagccttcagacaatgccagacaactctgcaacagaccccaatttaggccctgtaaaccagaaatgtaagaaataatttttgcctaatgctgccaactttggggatgctttcttacgataattaaaacatttctcaccaaggaaatttcccattgtctgtggccccggggccaagacttctctcctcacatctggccactcctctatac

SEQ ID NO: 281 - DNA, 1532 bp, Homo sapiens
cgcccccgcagctgccgccgccgccagggcccggactcggacgcgtgcctagagtcctggggagcttctgtccacctgtcctgcagaggagtcgtttccagcccggctgccccaggatgggtgagttcaacgagaagaagacaacatgtggcaccgtttgcctcaagtacctgctgtttacctacaattgctgcttctggctggctggcctggctgtcatggcagtgggcatctggacgctggccctcaagagtgactacatcagcctgctggcctcaggcacctacctggccacagcctacatcctggtggtggcgggcactgtcgtcatggtgactggggtcttgggctgctgcgccaccttcaaggagcgtcggaacctgctgcgcctgtacttcatcctgctcctcatcatctttctgctggagatcatcgctggtatcctcgcctacgcctactaccagcagctgaacacggagctcaaggagaacctgaaggacaccatgaccaagcgctaccaccagccgggccatgaggctgtgaccagcgctgtggaccagctgcagcaggagttccactgctgtggcagcaacaactcacaggactggcgagacagtgagtggatccgctcacaggaggccggtggccgtgtggtcccagacagctgctgcaagacggtggtggctctttgtggacagcgagaccatgcctccaacatctacaaggtggagggcggctgcatcaccaagttggagaccttcatccaggagcacctgagggtcattggggctgtggggatcggcattgcctgtgtgcaggtctttggcatgatcttcacgtgctgcctgtacaggagtctcaagctggagcactactgaccctgccttgggccttgctgctgctgcacccaactactgagctgagaccactgagtaccaggggctgggctccctgatgacacccaccctgtgccatcaccataacctctggggaccccaacctcagaggcagcttcaagtgccttttgctgcgcaccaatgcccagcaggggaggtgaggggggctggcggggcgaagtttggggggtgttttgtggggctccccggacatactctctgcctggtggtcagatgcaggttggaaggggccttgctgagtggcgcaaggccgagcgttcccagcagggggagaaacccttcacaccccaggcccttcaggaactggggctttgccttgcagccacatggccccatcccagttggggaagccaggtgagctctgacccttgggcctgggcctctgcccctcccaacccagccgtcgtctccctcgacagcgcccctgctgtcttccccaccgcagtcaccaccacccgaaatgccacgtggtcactgtgcactgccctgttcatgtgcctctgcggggcagggccttcctggttttgtacactgctgtacccagatgcctacaaccatccctgccacatacaggtgctcaataaacacttgtagagcaaaaaaaaaaaaaaaaaa

SEQ ID NO: 282 - DNA, 2561 bp, Homo sapiens
cgccactccgcgcccgctatcctggctccgtgctcccacgcgcttgtgcctggacggaccctcgccagtgctctgcgcaggattggaacatcagttaacatctgaccactgccagcccaccccctcccacccacgtcgattgcatctctgggctccagggataaagcaggtcttggggtgcaccatgatttcaccattcttagtactggccattggcacctgccttactaactccttagtgccagagaaagagaaagaccccaagtactggcgagaccaagcgcaagagacactgaaatatgccctggagcttcagaagctcaacaccaacgtggctaagaatgtcatcatgttcctgggagatgggatgggtgtctccacagtgacggctgcccgcatcctcaagggtcagctccaccacaaccctggggaggagaccaggctggagatggacaagttccccttcgtggccctctccaagacgtacaacaccaatgcccaggtccctgacagcgccggcaccgccaccgcctacctgtgtggggtgaaggccaatgagggcaccgtgggggtaagcgcagccactgagcgttcccggtgcaacaccacccaggggaacgaggtcacctccatcctgcgctgggccaaggacgctgggaaatctgtgggcattgtgaccaccacgagagtgaaccatgccacccccagcgccgcctacgcccactcggctgaccgggactggtactcagacaacgagatgccccctgaggccttgagccagggctgtaaggacatcgcctaccagctcatgcataacatcagggacattgacgtgatcatggggggtggccggaaatacatgtaccccaagaataaaactgatgtggagtatgagagtgacgagaaagccaggggcacgaggctggacggcctggacctcgttgacacctggaagagcttcaaaccgagatacaagcactcccacttcatctggaaccgcacggaactcctgacccttgacccccacaatgtggactacctattgggtctcttcgagccaggggacatgcagtacgagctgaacaggaacaacgtgacggacccgtcactctccgagatggtggtggtggccatccagatcctgcggaagaaccccaaaggcttcttcttgctggtggaaggaggcagaattgaccacgggcaccatgaaggaaaagccaagcaggccctgcatgaggcggtggagatggaccgggccatcgggcaggcaggcagcttgacctcctcggaagacactctgaccgtggtcactgcggaccattcccacgtcttcacatttggtggatacaccccccgtggcaactctatctttggtctggcccccatgctgagtgacacagacaagaagcccttcactgccatcctgtatggcaatgggcctggctacaaggtggtgggcggtgaacgagagaatgtctccatggtggactatgctcacaacaactaccaggcgcagtctgctgtgcccctgcgccacgagacccacggcggggaggacgtggccgtcttctccaagggccccatggcgcacctgctgcacggcgtccacgagcagaactacgtcccccacgtgatggcgtatgcagcctgcatcggggccaacctcggccactgtgctcctgccagctcggcaggcagccttgctgcaggccccctgctgctcgcgctggccctctaccccctgagcgtcctgttctgagggcccggggcccgggcacccacaagcccgtgacagatgccaacttcccacacggcagcccccccctcaaggggcagggaggtgggggcctcctcagcctctgcaactgcaagaaaggggacccaagaaaccaaagtctgccgcccacctcgctcccctctggaatcttccccaagggccaaacccacttctggcctccagcctttgctccctccccgctgccctttggccaacagggtagatttctcttgggcaggcagagagtacagactgcagacattctcaaagcctcttatttttctagcgaacgtatttctccagacccagaggccctgaagcctccgtggaacattctggatctgaccctcccagtctcatctcctgaccttcccactcccatctccttacctctggaaccccccaggccctacaatgctcatgtccctgtccccaggcccagccctccttcaggggagttgaggtctttctcctcaggacaaggccttgctcactcactcactccaagaccaccagggtcccaggaagccggtgcctgggtggccatcctacccagcgtggcccaggccgggaagagccacctggcagggctcacactcctgggctctgaacacacacgccagctcctctctgaagcgactctcctgtttggaacggcaaaaaaaaatttttttttctctttttggtggtggttaaaagggaacacaaaacatttaaataaaactttccaaatattaaaaaaaaaaaaaaaaaaaaaaaaaaaaaaaaaaaaaaaaaaaaaaaa

SEQ ID NO: 283 - DNA, 1633 bp, Homo sapiens
cgggaaccaggatgcgagccacagctttttcagctggttctcaaaccatagcctcccagaggctgacaggattgctgagattatcaagaatgatctgtgggttaaccctctacgctactacctgagagaaaggggctccaggataaagagaaagaagcaagaaatgaagaaacgtaaaaccaggggcagatgtgaggtggtgatcatggaagacgcccctgactattatgcagtggaagacattttcagcgagatctcagacattgatgagacaattcatgacatcaagatctctgacttcatggagaccaccgactacttcgagaccactgacaatgagataactgacatcaatgagaacatctgcgacagcgagaatcctgaccacaatgaggtccccaacaacgagaccactgataacaacgagagtgctgatgaccacgaaaccactgacaacaatgagagtgcagatgacaacaacgagaatcctgaagacaataacaagaacactgatgacaacgaagagaaccctaacaacaacgagaacacttacggcaacaacttcttcaaaggtggcttctggggcagccatggcaacaaccaggacagcagcgacagtgacaatgaagcagatgaggccagtgatgatgaagataatgatggcaacgaaggtgacaatgagggcagtgatgatgatggcaatgaaggtgacaatgaaggcagcgatgatgacgacagagacattgagtactatgagaaagttattgaagactttgacaaggatcaggctgactacgaggacgtgatagagatcatctcagacgaatcagtggaagaagagggcattgaggaaggcatccagcaagatgaggacatctatgaggaaggaaactatgaggaggaaggaagtgaagatgtctgggaagaaggggaagattcggacgactctgacctagaggatgtgcttcaggtcccaaacggttgggccaatccggggaagagggggaaaaccggataagggttttccccttttggggatcacctctctgtatcccccacccactatcccatttgccctcctcctcagctagggccacgcggccccacattgcacttctggggggtgaccgacttcgtacacgggtttaaagtttatttttatggtttagtcattgcagagttcttattttggggggagggaaagggggctagtccccttcttttggccctccgcccccgcaggcttctgtgtgctgctaactgtatttattgtgatgccttggtcagggcccctctacccacttctcccagtcagttgtggccccagcccctctccctgtgctgtgtggagtggacaccctgacccccgaagcggggagggccgctgtggccttcgtcacagccgcgcagtgcccatggaggcgctgctgccaccttcctctcccaagttctttctccatccctctcctcttcccgccgcgccgctagcccgcctcggtgtctatgcaaggccgcttcgccattgcggtattctttgcggtattcttgtccccgtcccccagaaggctcgcctctccccgtggaccctgttaatcccaataaaattctgagcaagttcaaaaaaaaaaaaaaa

SEQ ID NO: 284 - DNA, 31737 bp, Homo sapiens
aattccagctctacaacatcttactttaagatatactctgggaccagacacggtggctcacacctgtaatcccagcactttgggaggccgaggcaggtggatcacctgaggtcaggagttcaagaccagcctggtcaacatggagaaaccccgtctctactaaaaatacaaaaaattagccaggcgtggtggcgcatgcgtgtgatcccagctacttgggaggctgaggcaaaataatcgcttgaacccagaaggtggaggttgcagtgagctgagatcgcaccactgtactccagcctgggtgacagagtgaaactttatcttaaaaaaaaaaatctatttctgcagatatgctcatttgtccaaaacacatctactgagcacctactgtgtgcaagattttgaacctcagattctgcagagagaagaggcctgaatgtaacccaggtcttatcctcagagaccatgcatatgaactcttttacaatacagaaggtgatatgtgaaaagaaaatgagtcaattcatttagcctatggcaatcacttcagttctctgggcttttgtttcctcttctgcaatcatgtaataattatgaggtgtttacgaggattaagatgggatatattatttcgcttaggtgctttgtaaatcatgaattgccatccatgtcaattccttcttccttttttctgtctactttttcttccttcaccccctcctctcttttccttcttgctccttctcttccttttcgctctttgttttgataggagccctgctgtctatcactgaggcattatcataattagctgatctagtctgatcattaaagtgacagcacagctggaaatcttttgatccaacttgttcccttattatggcacaggaaggctgagagttgctggtaaatccaactcttgcctgatttagatgacgttttttccagtttgttgctatacataagatatagaatggaatcaaggtgaataataacctttattttcttagggtttgcatgtaactaagggaaaatttgtttagacacaaaattaaagtatttaatatttcaaatcagttagcatttatgagccaaaataggcacacccacaacttctgggttcagcgcttttatgtccctagccaaacctttgtttctgggaacctgtgatagaaaataaagcctgaaagaaactttagaggtcagattctctgatgcccccaccttttctttggacaataaactgaggctcagaaagcagaggaatctgctgtcacatgattaaattagcaacactatatctagaactcatatctcctgattcccattctattcttctcccatactctgctgtctactttccaggtccaatgggctgggaagccacagactccgattccttccataagctctccttctttctgtttaccttggttttcctcctttcaaacatccctctctcccaaacacataccttctttctgcattgtaccttctgacagtcaagactctttagccccagggccatcaaagccacagtcggacttgtaaatagcccaacatacacaagtgcccagtgcgctacatgtctgtccccatagtaagcactgtcttatttaaacttcacaataatcagtaaggtgtcattgttctatcgtatagactagtcagctaaaactcagagaactgtgtgtgacttgcctcaggtcataacacctggacagcagtagggctaggatttaaatcagacctatctagtgccagagctggtgattgccttattccctcttcagcatagccttgaccttagaaaagagaactcagtggtttaagtaaacaccaaggggtaattgagtcttagctcttttatttgagagaaataacactgtgaccctgggctcctgaacatttctgcatcccttaaccacatataaacagtgagaagtaggacaagtcacttcattccctctcagataggataaatgataatacctccctaacgtagttgttgtggaaattaagaattaaaatagatagtgtttggaaatacctcaggtagtctgtaaatgactatataaatattaagtttccataattggcttatgtttttactaatccaaatgttgactataatattgtttatactattttattgtaagccttctcaaatactttagttaaataaataatctatgtgtacaataaatgcctgaataattaaaatattttattggatttttatatctaatctcttaccacaagagaggaagttaatttacagcttataatattatcatatcatttctttcatctagtcaaaaaagaatcactattgtcatcttaacaaacatttactgagcacttgccagagactggataagtattttatttctcatgatctcacgttaattcttcattattatctccattttagagatgaggaaactaaagcccaaagcatctgagaaacttgactaagatctcataactgttaagtgaaaaagacaagtttttagtatgtgtgatgttcctgctattttatagcacctctgtaaaaataaaactctcaaaaggtcttaaatggccttcaatcaaggtattcggcacaatacaacacaggcaaaatgtgaaagctaatgagtggatgtgtgtatatgtgtgtctgtgtgtttgtgtgtgtgtagggggcagaaggttggaggggaacaggcaggaatgcataagaaaatttaagctaaagaaaaccattgtaagggatcacagcctgtagctctacacttcatatagagaaacacatgcacaattattaactgattcatttaacaaaaatgattggtagcttaatatgtgcaaggactactgttcacactttagacaacacagaacacatagtcacagagcctcctttttagacctcacaaatttccagataaattgttagataattacctatatacttaaattattttatgtaaataatttacactcgaacaacttgcctgtgggggtatgcttaaaaactggttcgtatccgaactgctcttttatgtaactgcttaaggaaaggaataaggagaatgtccagcctcaggggatatgaaattaggagttggagcagaggaagatgaattacttaaatgggtcgagacactgggacataggatacttttaccttcagtagaactttgagctcttcacacacaaaaaagtctagtgtcctgaaatctaaataaagcaaactggacctctgatttcccaaggttcacgttaagagcccaactcatccatggaggacaaaagaaatgagagactggattttcatcataggtaactccaaagtttagtcaataacaatttctttcaaaggcctttaagaaacctggggtgtggccagaggaaaagtacccagtaggccaaccaggagaggaaggaaatatctatagctaatttcattttgcatagcactcattgctgcaaagtgcagcaaaagagagtagccagtggtggcagaagcaaccccaagctgcagggccctgttgtcaaaatttctcttcttggcactaaggaaacatggcctcagcttccctgtcgcagtgggcttgcatccctccacctcagaaatcagaaagggtcttagaatcaggagccatgaaattcccaccccaacccattcaagtaacagctgttggaacagacgggttatcccacctctccatgtgagtttcttcattggtaaaatgggctcatctccaccatgagccttcttcatagggcaactaatcgctcaagtgacatgatggatggttaaacacattgggaggtgatcaaattccccaaacatgaaggaatagattacttaaaatctaaaggtgagaatacagatgtcacacccatccacagttgaaaacaaaaaagaaactagtgaataatgcacataaatgtacagctacatgcctggcccattttgtatggaacccaaattgctcaactagttttcatggtgctcaccaagatatttccaactcttttctctaggattggcacagcctatcccctttatgtctcctatacttttgtcaaattaatcacccagtgactcaggagttcagaacatgaacttactctttaatacctccacttgtttgttggggcatctccacctcctggaatgcctgtcctctgcatgtctgtgtgtgcagacctgctcaaatgcagcctccttctaaaaggaagtcttcgttgattttctctgttgtaagtcatctcaaccttaatctgagcgccacttatcattctaaaaaattatttatttatttattcatttatttatctatttcagaaacagggtctcaccctgtcacccaggctggagtgcagtggcatgatcacggttcactgcagcctcaaactcctggtctcaagtgatcctcccatctcagactcctgagcaggtgagactatagacatgtgccatcacacctggctaatatatatatatatatatatatatatatgtatgtatatatatatatgtgtatatatatatatattttagagatagggtctcactgtgtttctcaggctggttttgaactcttggtctcaagcaatcctcccacctcagtctcccaaagttgagattacaggtgtgagttactgtgcccagccccttatcatttttatttgtacttcacattctaataatttgtcttctcctgagtttgttgtttccttgagaacaaggattatgcccgttacctaatggatgacatttatcaaacacttaacatgtgtgatctcttttaaccatcacagctaaataaggctgttgatactggtagttttcattttggaaatgaagtaacaggggcccagagaggttaagaaagttgccagagttcacaggtattaggtgaagtcaaattggaaaccagggatttccagtgtaaatccttaattcttaacatccatgcctccatttattgtaggtgtttggcacaggaagtgcttaataaatgcttcttaattgagtgaatgaataaatacatgaatgaagaaagtgtgaatcttctagtatgaatgttctcactccatgtgcaggacctcacatcctctttccatagtgactgcacaatgaatgtttgctgagttcaatgactgaaaggatctatactagggcagatgtctaggggactgctgagacaagaaggccgcagaggtgagtcatttttcaacagacgtgagtcctgttttttgggggcttacattttaggaagatgagcattgactggtatttttcaagtttagggaagggtagatgttggcagagaaaagattattcaacctcagagaatgatcaacagaatattcagaggtaaccggtaagacaagtctaattctgagcatgaataagcttctccttaaagaggaaattgaactgaagatcacgaagaataactagatgactcacccatcaaaataggaagttctctctggtaaggaagatggtggcattgaggtggcagaaaccacaaagatcctcctcaaacacttaccacatagcagacttcactcttgctacttgggctactgtctctggagtggaagacctgtccactgaccaggacttgatagaggcagtgaagcactgtgttaaaaagaccccaggccctggagccgctgcctcgctctgaacaaagactccctcatgtagcagctgtacaaacttgggcatttgtaaaagtagatataataacagttccttatgcaccgacttattatgaagactgagagttaatagctgtaagtgtatagaacagtgcctggcttgtactaagcattcactggaggttagctatttttattgtgcttctattgctgactctaattgtttgtatatttgaactgaagaattctcagtgagttttagaaggaagagaagatgcttacatatcacttgggtatgaaacaagagtataaatcatacatcttacatctcataacaactttattcacaagatgatcttctttcatcagcccaaggactggcttctctaaactgccacataattgtcctctgcagtagaactccccatagaccattatgttttatgtttatggactttcacccaagactttaacagcagcaatggaaggattctgctaaaatcttatgtttcattttcttttactttcggaccattggaactattagaacccatgatctattgttcgtatataaatattactctaacctggaaagtagctctttctttattaaggcaaatatttatttaatccatgttttctatttaaaacatcaaaatatatattttaaaaatgcatacattaaagaaaaaaatgtatgcaaagaatttataaccaaatgctggacttagcattactgcaaaaaaatcccacaagttctgattttcaattttgcagatagtctttactataaacatgttttagtataaacaatttttaaaattatgactggtaaataaatatttcagaatgttatttatttatttaagtttgtatatcaagcattgccgcttaacaccagatgctacagttttaatttgcattactattattaatttaatacattaataacatgcattaaatatgagaaacacaccaataaataaaggagatacttccttaactgactgatgagataattaaactaatagccatggaatttttaaaaagtctcaagttttttccataccagcaccagccatataaaatgtgtgggctttgttggtggatgggacacagaatgggtttgagaaatctggagaagatggtagacatggtgaaaaacagcacagattttgaggccagaagactggcctctaaatcttatctctgctacattggctatcggtcttctgagcctcagtttactcacctgaaaaacaagcataataacaccaatcttacagagtcattgggaagatgagtgctataatgtacgtaaagtggctagatcacagtagatgcttaataactagcatcttatcgggggatcattttgatttatttgcatgcagatacaatcagacagtgtttgcattgtttatttgttgtgttttgatcatttaaaaggcctattagcaatcctcactccacaaggttgccacctggggagactacagggttggctcatttctctgttccacaaaactttctatagttcctgctccaaagcacattagagaaaccatcacaccctgtacatactcaacatattatcattgataataaagagtaaagcactccactaggtgctgggagacttattttagttctggcttcatctcaaaagagctctgtgaacttgggctagctgcctactttttccaggcctcaattttctagtttcgggataagaaaatcagataagatttcttctgggaaaatttcagttccaaaactgtattaggaatttaattctatgattttctgacctagggcatgggttcaagacaaaagagaagaggaaaaacctgtaaaaatgactaaggagctaggacataataactgtccatctcatttccaagaatgtgatattgacctggttttcacatgatcccctagaagccaaaatcaaagtagaccagatctagctcccttctctgtgaccaagggaagattcccatataagcctttatcatcaatacctaaatctatgatttataaatattcctctagtcctgtcaatagatgtgtactgtgtgcggcatataattttgtctatccattttgctgaccaaagacttacatataagttgagagtgggggtatattctgtggtcatagatcctatttgcatccattgaggtcagtagccatgcccatagcccccagatatcattggtaagtgctaatttgctgtggtaaatttcttcctataattgaacaaataaataagtccaaatttaaactcttcaacttctaaatgtgatcaaccatggtatgagccaccttggaaggtggagagttccttgccctgagatacctaagaaaaatctggatagacactttggtaggggcattatatgttggagattcagatatggagtaatccaaaaattttatgattctttggttccatttactcttaccaggcccactctgggaatgtgagtaatgagttttatttttggatatattaaaaaacaacaaaaacaacaagttgtcctacccttttggggaagagagagaagcccgctgtgcacatgggctaattgagtcttttaatactaaagacactaatattccaggattctgagccatggggttctgcataatgcaatttaattaaatatagatggcagcactggggaaaaaaatgtgtaatagaggtaactgacatgcccaaacctggacctggcaaacaggaggggccaagatcaccttactggtatttgctgtggtacctgacaattacctgctggctctcttctccttgggtcctctgcgaatctgtgaaccctgcttattttgtgctcaattcagtgcccacggctcaacggattgttctatgactagtccagtccttctcttggcatgctgcctactccatgtcagaagttaaaaggttgcacttccttaaaatgcagtattttccaacagaacctgcatcaatcaaccaattagtataactacgcatgcactgctcacggctccatgctggctaatgatcactggctttgtcttatgcaaggctggtctttcctcgatccagctaagaaataaccacttgaaaggaagtgcatggggagatttcaaacacaacaggaagaacatcgtgtcaaattgccatagtcgtacaaaaggcagcatttgcagcatctgtccatacctggtaagagtgatgggtctcagtttgaacgctggggtgtggagggtgactcaggaataaaagaatggcctggtgaaggagtgactgaagaggctttctgccctaactctcacttcttgggctccttagcaggctctgtaactacctcattttcctgatttctatgacttaccctgggtccgtgctgatttgctgcctggatgaaggagtagcacagaccaacatcggtaggcgtgagagttgggtctgtgcacataaagaagggttcagaatctgtacaggactcaccctggcttccggcagaacctaagacgagggagagaggcccatccctggtgtacctgaaaggccaggtccgtgcttgttaattaatgcaaggcacagtgctaaggcctggcttgccccgctgttctctctcaggagccacaaatgggtgataataccactagttagagagcagggctcacgtctctgctcctgcccgctcctgtctgggtttgctatgaccgtctctgttggaagaaaactatttggctctaaactaaagtaagtcttattaaccatcatcctttcaaagaacacgattgtattgttctctttctaccctctctcctcttgctttgtctttcttttggttgtttcgtctctggtacttgtttaagtgggggatttaaatgtttggcgtggtcactacagaagcccagacgtaagatctttgaagcggttggtgaaaaaagggaagtgatactattgggtgaggggtgacatcaaagagaagcctatgttctgttccctacggcgtggctgggattttttactccaagaaaagaattaaacaacaacgctttccaggaaaagagtgactttcctttttttgcccctcccatcttcttttcctgatccattcagacatacaagcaattttgttttaaggagaagcctaatgcaattgagcactaatactataattataattaatgaaaataataatattcgaatatcttataccctttctgtttatctttgaacaacacagtagtagttacaaatgacaaatatgaatattatcccagtttttcatggaggaaaccagggccagaaagtcaaatgccttgccagggtcatacatctgatatttaccatcaaaatatagtctccagtttttcgactttaggctcagcatgtttttatctacaccttgctgcctcttcccacataatcttttaagattaagtcttcagattccagagttggggccatggagttactaaaaggcctaagaaaaatggggctttgaaaaggtcatattctcatccttcttactctgcactgtgcttgagtattaaaaggctgctttgaaaattcactggcccatgattacttgactaatgccagtaataaaatgcatatatcaaaaccacacacttttatttgatttttctcagcccattacttgtcttagctgagtggccagctatgtgtaagcctgaatggtaggaaggttttctggaagcaatgaccagttatgaagtttctgttgagatccagggagcaactttaggtaagcatatttttgttatcattcagagggacaagagatagaccttacatccagttcatcagtgccagaagggagctttgccaacagggtctcctctttgatcaccacctggatctcctctggaatcctgggaaggaaagtgatggatgttgatcagaatgctgctgtgggcagggttttgaagaaaactaaccaattgagtgtgtctggctgtgggagaaattttccaattcctgcaaataaggccaaaattatgggaccatttctctcctctttcctcctcttgatcattatcagcatcataaaatcaaccataggtgtgactctagagagatggaagtacggcgaagaaggaacactcagccaaggggcgtggagtcctggttctctccaggctctttgtggtcttggacaacaatttgactttgtgctctttaatgttcccatttattaaatgatgagttggacgatactgcctttgacacttccaggcctgatattctccaattcctatctaccttgtctctctcccataattaactttataattacaagtgcctataatacattattttgagttttctacagagaaaaaaaaaatgcaaggcagattaagaagtaaattaacaataagtattaacaaataatttctagtttgaatatttgtcttcttttatatttatttatttatttatttgagacagagtttcactcttgtcacccaggctggagtgcagtggcactatcttggctcactgcaacctccatctcctgggttcaagcaattctcctgcctcagcctcctgagtagccgggattacaggtgtgcgacaccacacttggctaatttttgtatttttagtagagataggatttcaccatgttggccaggctggtcttgaactcctgacctaaggcgattcacccgcctaggtccccaaagttttgggattacaggcatgagccattgcacccggcctgaatacttgtttagtgtacaaaattagaaagcaagtaaatgaaaatgaaaataaaacctctccattatcccatcaatcagagatgtccactataaagattttggtaagttttcttccagtgtctctgtatatatatacatatatatatacacatatatatatatgtatatatatacacatatatacatatatatatacacatatatacacacacatacacatacattttatatatagatatacacatatatctatgtgtatctattttatatataaaaatatttttctttttttttaaatcaaaaaaagagaatttgttgtcttatgtaagtaaacagaccaggtaagacttgatccaggattcaaaccatgtcacaaggagccgaatttttttgttctccagtttgagactcctctttcccagagacagtccaaattttactctgattggttcttcttataccataagtatatataaaaatatttttcattgagatttcaaaagattttttaggacttactctcactatatacctttggcctcatatcaattgtataagatctaattcctataataaatccattattctgtattatttttggttctgctttcctgattgaaccctgctggtacaaagagtggttgaaactcctaagccttgtcacatctgggttttggtattgggttctccacctagacattttccaagaaaggattttgaagcactgaacagtgtgttccaaaacagctacagggtttaaaagaatcagccgttttctattacatttaacatttattgaacatatactgtacatgtcagacctgtgctaaatgatttattagtacatgtattatattacttaatcctaactccctgcgggtaagtatatcattcctagttacgaataaagaaactggggttcagggatgagccaaagttgcacagctaataagtggcaaggtcatgattcaaacctaggcagtttgtttatgaagtccacactctgtcttcaaggtaagtcattcactgacgtaccaggctggagaggcctaatctattggtgggatggcagggtatttgttagttgcttgcactgtgagagtgcatgagcttgtgaaatgagtcctggtgaggaaggtagcaggtgtgctggaataagcactagacatgaaatcaaacagacatgggattttcccatcactttcttgtctcagcatcaatgctttcatctgtaatagagagataatcatatcagtcttacaggtgcagattgtggtgaggatagagaataacatgtaaaagcacctggcatgtttccaggcatatagtaaatgctagtggagtttaattgattctgaatctgagcagaaaattttaagttgagacctggttttttaatctcggatggagcacacttgatatgtgattttgaataagatatagggcctttctaggctcaagttcctcatcttcttaggaggtgattaaactagatgatggctaccatcctgcctaggattctaggcttttagttggtattaagaggaaggaatgtggcagatggtattttcccttctcacatcagcctgaaatgaggccaaattctcgagtacagtgtgtttctcccttggcccctctgccctgtagatattcttgactagatccaagcccctggaactttctgaaaggtttgaggtctgatgaaaatcacaaccgtttcttagaaggaaggggtgaggcctgtatctttgactgcctggatgctgttgcttttattagctcttctaggaaaggaaggtcacagctttataggtttcccaatgcagatagaaaataagtcctttgacttgctccaaagaattcagttcggaaatcacaaatacagatgatttattgggtcccttatactctattattttgtgattcagctgtaaattaacacattaattgaatgtaactgaagagctcttggacactaagcactatacagcatagagaaggggcatgattctccctctaaagatacctctctctaatctgcctcctttaaggaaatataaaccaacagttgaagaggaggtgcaaattttggtcagattttccagaaaggatgctgaagattttctcctatctccctggctatttctcattctcctgtgctagtgccttctcctctcccaaacttctgaacaaggagtggcccagggcttagccattgaacctcttcttgttctgtgctcacttccttggagattttattcagtttcacaggtttaataaaatcttagaccctgagaactcctaaatttctatctccagctagatttctctccagaactctagattcagaaatccatctgcctgctgagttatctgcctttgaatgtctattagtcctctctaactgaacatacacaaatgggagttcctgatatgcttctaactccttcaaacctgctcaacctaaagtctttcctatgttagtaaataacaagcccatttgttacagttgctcaggtgcaagtacttggagccatctttgactcctgtttctccataacccacttcaaatctatcagtaatactattgtctctgacttgaaaatatgtgcaggaattcaaacatttctcactacctcccagtccaagccaccattgtctctctccaggattatgataatttcttcctaaacagcctctatgcttccaccttgtccttctcaacagagcacccagagggattctgtgaaagtaaaatttaaacgctgtctaaaccttcggtggccttccacctcatccaaattgatagggcttccaaagccatatgaggtgtctttttttttctctccatcttcatctccccctgctctgccctttctcactgcccccaccaaaccagcctttctgaacactccaggtataatctggccctgggcctgtgcccttgcacttccctctgcctgatgttcttacctcgatgtccaaatggttcttgccttcacctcttctcagtctttaatccaatgtctgatgctcagtgaagcctttcctagccatcttatctcagattgcatttgtcccttcatatatgtcctatccccctttccctgttttttttttttttccttttcaacatttattaccatcaaaaatatacaagccaggcatggtggctcctgactgtagtcccaacactttggtctcctatgttgtccaggttggtctcatgcttgagctcaggagttcaagaccaaccaacataggagactccattttacaaaaaataaaatcaagaaaattagcagggcatggtggcacacacctgtagtcccagctacttgggaggctgtggtgggaggatcacttgagcctgggagggcgaggctgcagtgagcagtgattgtgccactgcactccagtctgggtgacagagtgagaccccattctcagaaacaaaacaaaacaaaacaaaacaaaaccatacatatttactattgaatttattgattatttccttccactagaacaaaactccacatgggcagtggagcgcagtggagggcattcagtaaatattaattgaagaactgggttggatggttggtcaacagcttcatggaggagcctgggtttgagctatgttactggccacagagaggatctgagcaaacaaataggctgagaaagaagtgcttgggagagagggacactgagcaaaggcctgggtgggagcccagtggggatggctagggctggactaactcatctgttttccatcagccttcaccttcctggttttctttcttccagaatatctagtgtcttttaggatgtggtaacaatcctgtggcttcttggtataatagaaagctcatggatggaattcagagtcatatacctgaatctagaagtgtcacaagccactttacctctctaaccctctgcttgcccatctgtcaaagaaggataacaacactggcttgtgtttctcttggggctgttgtgaagatcaaatgaggcaacaaatggaaaaatgcttctcacagtgaaagttggatgattatagtggggattagtaaaacgcatctgtgtatggctgaaataattactcagagtcatgtccagattattcaccatagtggtatggaaagggctagaggattccaattggtgactagttcagaaatccttcatcattcagctttcatatatgggagctacatgggaggaggaattggaagatgtaccttcctggggatgtgtcagtgtgcaaatgaggagcgatttatccctcgtgtaccaggttctagtgattcattcttctcctttcacccttataaaaaatttatgagttaaatattagtatctcattctttagaggtaggaaaaccaatgctcagaaaggttaagtaacttgctcattgtcatacaactatttggtgtcagagtcagaagaaaccattttgtctcaagagccttgctctttcagtaggctaccttttcagacaccttggtgcaaataattaagcagcagcagcagcactatcccagttacctaaatttgggcaagtgaataatacgtaagtctaacattggggagcccaggcggataacagactgagctattaaacacaattctgaaagtgagaaggaaggtcagtgtgcctctaaacccatgaatcctaatccttgtctaggtcactgccttgtgctatgaatgcttcctttcagcagtgcctggtaacaatttagaagaaaccaagattttgagttaaagttttagtaagagcgtaagaataataaagttggatcaatgtccagtggtctttctaagcatcagaatcttttttttttttttttttttttaaagcagtggtataaaggccgggcatggtggctcacacctgtaattccagcactttgggaggctgaggcgggtggatcatttgaggtcaggagtttgagaccagtctgaccaacatggtgaaactccatctctatcaaaaatacaaaaattagctgggggtggtggcgggcacctgtcatctcaactgctcgggaggctgaggcagagaatcacttgaacatgggaggcggagcttgcagtgagcagagatcacgccattgcactccagcagcctgggcaacagagtgagaatctgtcaaaaaaaaaaaaaaaaagcagtggtataagaaatatgattattttgaataattagtaaacctagtctagattttaactagcaacacttttgcagcaagttacctgctgcctgtcacataacggggcttaataaatgttcactggccgggcgcggtggctcacgcctgtaatcccagcactttgggaggccgaggcgggtggatcatgaggtcaggagatcgagaccatcctggctaacaaggtgaaaccccgtctctactaaaaatacaaaaaattagccgggcgcggtggcgggcgcctgtagtcccagctactcgggaggctgaggcaggagaatggcgtgaatccgggaagcggagcttgcagtgagccgagattgcgccactgcagtccgcagtccggcctgggcgacagaccgagactccgtctcaaaaaataaataaataaataaataaataaatgttcactgaatatatgcatacatctatatgtatatatatagcatgtatagtaacagtattgttttgataattatgtatgtaagttcatttgtatagatgatgaatgtacagatggatggatacagggcccagatgtcagagaaatgtctcccaaaatagcctgtaatcatgtataggaagctgacagaatgcttactttgaaagtgaatgcaccagaaaatttacagggtacctactgggtgctgatgaaaggaaatagaaggcatatctctttgcacttgcctcagataaccacaaaaggcatatatacaattttaaataaatcatttgtatagtttagaattgcttgaatttggaggcaaaagaggactgttttccctttagtgtgactcaacaatcacaggatgtgaggggtgcaggaggcctgggtcatctggtgcatttagccattttagattgaagattgaactgcataaaggaaagttacacagtgattcataggcagatgtttaaaaaaaaaatagaaataaaaaactccctctctagctgccactgttttctgtaggtgctatggatatcctcagaaataggtatttgcaaagatgcggaaaatttggtaggacggtataaagtcaattgcgtgcgctttggatttatttcaacctgggtttgaacctccttcatctggttactggctcttcatctcagggagtctatttgcgttttgaacctctggctcctgacttatgaaatgaagatacctgactgcatgtctcctgtcgggatgaaatgagattacattggaaggggctcagcagactgagtaccacctcacactgtttctcagtatttcattcttcctcatacccacaaattctccctttgtctctaacgtcctgggtacccttgggccaggcacagactgcttcctcccctcctcatctgctacattcaggtgttggatcagacaatatctaagattccattcaatgagtctaactgtctagtcccattttttaccagaaagctgggatagctggacagtatataaaacagtctactttgtacacatttatgtttacaagacatttactatgctttgccacatttaatccttaatacctgcagagcagtagttgctttcaccttttacaaatgagcaagccaaggcaacaggcatagaggaaataatcccatacctctggctgtcaatcagcatgcagggaagacttttaaaggcttgacaacagcattcaaacacaaggctcttcatgatacccttggccttaaaaatcaagtgtaaacttcccaaattcactctgtcccttctaccccctcttaaactaagagctttagtcatcttatctttcttttttgttgtctcttttaaatgttgccattccaggctgaggtcatgactctgtctcctaagaaccgtaatcaaatttggaagacaacaggactgaacgcagagccttccgtacctggttcccagactgaacatgcataaacaaagccgatggctgggaattcagcccttgttgcctgaggctgtggggctggctgtgaatttttacccagctcctacctgactgtctttttttagcatttgacatgcttgctgctggatccatgatagagccactctctcaagacattgatttatattctcccttgggggcctagaactatgccctacacaatgggtgctcactgagctggagatggtattgccgccaatgcagtccagaattgcatcaagtattttagcaattgcaccaaattatcagccagtctgattcgtagcccttcccacatagattcacaaagcccactttcagaaactaattcttaataatgcaatcagttcttggaaactgaagccgagtttcatatttgaatgttgactttcaccatgcaggaaagttggccacatgcaggagtgactggaagattttggcaaagatattaattgggattttccattctcagagaagctgcatgtgctaatgcacaggtaatactccattctcagggttcctagtagaggcagaattgaactgtttccccttttgaaatgcaataacatctacttctcagggctatcatgaggatgaaattagaagatacaggaaaaggttagcacagagctttgctcagagcattgagcaaatgtattagttgttgggactcttgtttgaagtaaaaggaccaggttttgaacctcattctgctgctcactagcccagtgcctttcccgttctgggtccagattctcttatcttctaatgagagtactaattgccacatacttcacagagtcatgatgagaaacaaagaatggctgagaaagtcctttgaaaactagatggctcaaacaaaataaagcattattaggtatatgtctaatccctgtgccatggtttcagcccttctttttgtacgaaaagccttccctccccatacttcctctctttaacctgcgtgttgaagttctatccttcattcataaggcagtaaaacattaatagctaagattaaagtcttcagattgctagggttcaaatcccagcactgttttttattagttgcttgactttgggcaagctacttcaccttgctgtgcttcagtttccagtctgtaaaatggggataaaaaaaaaatacccatttcataagattgttgtaaggactaaattaacaagtgttaagtacttagaacagtatatactccatactatataaaatgctagccataattatttcaaggctatgcttattgttttgatgtctattatttcaagaatatgtttatcattttgcattattttattattatgttcaaaccccacccctccaagaaactttcttatatctctgaagcaatcatgttctcgaagtcaaccaaagtatattgattgtagctcagttgtagctctggtcattgcttgtgtgtttgtttatatctccctcccccaccagctttggggccctaagtgacagaggtttgctcttttacctccgtacacatggtcagtgtacattaaatatttgttgaattggatggaaggtatgcaaagcaaatgtatacacatgaataaacctaaatttattgtataacagctaataacaccctctacataataactacattttcagactgaacaaaattacaaccttttgcactctccctgacacatagtatgtgctaactaaatgtatttacttgaaaatatgagaagataaataaaggtgcataaactccagtaaaagtctcagtctattgggtcctcttccttcaaaacatgtgcgagatgggtaagttgcttatcttaggcaccaggagaggattaagataccaaggagaagaaacaaatagctactgacctccaggcactcacattcaagaggagagacagtgcaattactaaatagtcacagggggtcataagtgctaagctgagtaggatgaaatagcacagcgatgtgtgttcagcagctcagtcatctctctaagatttggaccttctcaacatcagattgcccaggtatgttcatttgggatgattgtaccttctttttcaataagtaaggaaccaggggaaaagattccaagttgactaaaggcagaggggaacaggtcagttataagagtgtggtagttcgcaatacagcaggtgagaatataaaatgaggaggtaagaccataagccacgtctctagaacatatctcatagaaagtgcttctcagtctcaaccattttgatgtcaaatgtggagaaaatattgtgaaacaacaaaaactatcctggtccagtagaagggagacctagtttcttaccaaccccatttccaccagtgactttcctccctaaagccccgatttcactatcaatcgagaaatgagtttgaacttgagtatttctaaggaccattccactttcactgctttttggttctattttttaacacctgatctgatatgaaagccaactctttcttctagcttcaaatactacctctattttgatgaatcgcaaatgcatatctcaaagccagacatctcttttgaatccaagtcttgaatatcaccttgcctactttgccatctacctcagttgttcaaaccagagttttcaacaatttctccacctccaaaagattttcattttacagtgttttttgcttgtttgtttgtttgtttgtttgttttttaactcagtaagtggaaacacattcgcccagctgcccaattcagaaacttgggattcattcttgatacctctctttcttttaccacacactctggcttaatctgattcattgttaaatgttgccaattctaacttcaaagcaactctcaaatatttctacacctcaccacctatatgtcaaaggtgtgtagtccaagctaccttcatctttcactaggactcctacaatagtcacttagaaaattgcctcttgtccatttctaattcgtcttctacacaacagctgggatcgttttctttcttatttatttatttattgagagggagtttctctcttgttgcccaggctggagtgcaatagtgcgatctcggctcaccacaacctctgcctcccgggttcaagcggttctccgaactcagcctcccgagtagctggtattataggcatgtgctaccacgcccagctaattttgtatttttactagagatgggggtttctccacgttggtcagcctggtttcaaacccctgacctcaggtgatctgcccgcctcggcctcccaaagtgctgggattacaggtgtgaaccacctcacccagactgatccttttcttaaaatgtaaaacagatcatgtcaatcatgtcaccatcctgcataaaacccttaaatggcttcttgatacacttaaactataaattcctgaccatggtctatgaaggcctaaatgatcttgattctccctccaactttatcttccaccatgctggcctctttcaggtctctgaacatgtcacaattttacccactttagtgttgtctggtctctgtttcctctgcctggcacactttcccctcactcttggcctgactaacccatcttcctttttcaaatcccagtttaaagtttactagagagctctgtacatgtaggtaacttatctccttcccctgtcttttgttttgttttgttttttgagacggaatcttgctgtatcacccaggctggagtgcagtggcgtgatccctgctcactgcaacctccgcctcccaggttcaagcgattctcctacctcagcgtcctgagtagctgagattacaggtgtgcaccatcagaaccagctaatttttgtatttttagtagagacaaggtttcaccatgttggccagtatggtcttgatttcctgacctcaggtgatccgcctgcctcagcctcccaaagtgctgggattatgggtgtgagacactatgcccggcccttccctcatcttatagcacctgatttcctgtatctcagttatcatacttcataataaaatactcatctgtggatttgcttgtgtaatgcttgtctactcaactatattctgagctgccctaggaatgggtctgcattgttctttgcatctgcaaagtctatcccagtgcttagcatagagtaggtgctcaattcatgattggtggttaagtttataacctttgtgtatgcatattagtaagatctaatgatatgaatacatgtttattccatgctgaaaaagtgcaatcaagtgggcaatgaatgaggaaatagagttgactatgtcccatttctctaattttttcagttcttaactcctagtatcttgtagcactcctccattctcttactgaaccttccaggttttcagggttgagtagagaagtttggtatgatgtcccctgtgctttgctccccccagctatatttagctttgtgaaggaatgtggcttccacaggtatgtttgggtgagaggtgttgggaacagaatgggtggaaaaacggaaaaaaaaaaaaaaaaaagaaaagaaaagaaagaaagaaactatgtggaggaggtgcctagcctcactcagcatgaatgttgcccaggattcctgattttgtcccagctcatccactttggaatttttatgtttatttaaaaaggttttcattaatttattttaatctttaagattgcagtttttatgccatatacatcagcattctctccctcccacctctaggaatccaaaaataaataagcatgggcttggtgctggcaaaactaacaagtatgagcagacagctcctgattccaggagttttcctgtgctacgaccacctccatgcctggtctctgtggaagctgtcatgtacctattcctgttgagtctactggacttcttattccatttagttacctactgttacagactacagaaagtaggaaatgggtttttgagtagtttttctctctttatttttttcttaaaacactaataaatgtctgttgcttcatctgcctgttggttgcctgattccgttactggaatgaaaagtccttactgcttctctccagtccctatactcatcattttgggtttgctgtcattgtttgaagacagggtttcattctgtcattcaggctgaagtgcagtggcatgatcatagctcacggcagccttgaacttcaggcctcaagagatcctcccatctcagcctcccgagtcactggaactacaggcatgagccaccgttttctggcttgtgctcgtattttctttcattcctatcaaaaccaacttgctcctaatcccttcttatattcaccttgacattcatgggatccactctgcatttgttgcagaggttggaaggatagatttaggaattctcttagcaggaccagggcatttcctgtcttttaggcttttgataagaaattacctctttgttttgataactcactcatcaactcaattgcttaaacaatttataaataaccaccttgttgatcttataaaacagccctaataaatttggcttttgcttatacctttatctaagactgaagagagctcaaaacaactgattttttttccatttgggtagaggagagggatggggaggagctaaggtaaaaagagggggaagaaagaggaagaaggtaccaaaaaggaggatctaatactggatttcagttcccactactgggaaatggttcatttccaattctgcatttcaagaacaagaaggctttctggtggttttttttttaatcctctttggatcagtatgaatccttagtagcaacatatgtcttcctatacttaaagggttaaaagattttgggaagtgaaataattgtatttgaggatggttacaaagtcaagacaggacactttaaatacattgttctccagatacaatccaagcctcagactctgttacttaataacctgatggctttacttaactgcaatagttcactcattagtccgttcattcattcatcagtcacttagaactgtgaattatgattttcaaagtattttctcctccattgtgcttgattcccatgaaaatcctacaatgtactccctttacagaaagtaccattttagagaacaagaaactgagacccacaggagttagtcagttgtggagatttaactgaaacccagattctcagatcccacattgaattctatttcagttttacctactttaattgaatcaacattttctaagtgagcaccatgtaatgaacacaattctaagaaaacgaaaacaaagtacctatgtccttgagaagcttatagtttagcaaagaaaggcagagagcaaggcttgggttggagaggaagaaagtgcatggatccttggaaaatgctgaggaatctggtgtagaaaattgtggtagaagataagactggaaagaagtgagaggacctgaagggcttgattgattgattcatcatcaaatcatcaagtcttctttatatgccttcccaaattgtggccttcagtagcatcattactaatatttttttctgtcccattttctactgagcaatttgctggcattttagtgccagtgcctccaaagggcaaggttggtctgaacaacttgatgtttagatattgaaagctgctggacttcagctaattgtaacattgcttaaatcttgtctggtggcattatgcatgtgccattatgtcatcttgcccttgcctggccacagaaaataagtggttacaacttctggcagacagacccaaccctgaggcaggatgggccatggaaaataggatgctgtggaaattggtctgggtgcagacctggcacctggagatattacctgttgtcagtctatcacccaaaggtctggaatgcccagagagctgaggtgaacttggtcttagttgagtaggcatcaggatctactatatgtcaagtccctgctaggggtagtgtttggttctggagtccagactgtggacattaattgaggttgtgtgctttggaatagcataatgctgggtgatctgtctgctcatgggagaacctgatgggtaccaaacacaagaagctatcaaaatcaggatccaggctctccaatgagagggctgacaaaagttaagcaggagtagaggcctgcagtccaatacagggctctagtctcactgggggaatgagcattcttgcagtaaggctccggtccaaaggctgagacaacatggtgatgatggtgtagagaaagctgaggttctgttgtgtcttcctgtttgcagatcttcctgcattaggtgttggttgccaatcaatggtatgttgacgtggctgggttatccgtcattccaataaatactagatgaaccactcaaagtggctgaaactgcacagggaaggactcaatgcctcaccctgatgggggattggggtcagggaacagcctctgagaaggggctatagagttttactgggagcagagtccggacatttggaggccaatcatggctcaaggactatcttttgcaaaacctaaagcaagtttcagaacctttctgggctgttgtttcctcagtagactatgtgccctgtggagtcaggggcccgtattttattcgtatttgtttcactagcatctagcacagtgtctacctcacaagcagcagtcagtgaaatgcatgttgtttgaacgagtgaatgtgagagtgaagacagtgacctgagcatgcagaatcccatcagcagttgaagggagaagggccttatcaggcccatatgcttcttaccctcgcccttagattcttttgccctctcctctcctctcctctcttctcctctcctctcttcccctccccttctctcttctctcctcccctctcctcttcttttcttttcctttcttttctttctttttcttttttttgctcacacttttcttttaccatagcctttagattctgatgcctacctttatgcccttctttaagaccagagacccaatgaatgggtcttcttatcagctctgtgattgattctctgatgaaaaaaacattgagatagttcacttgaaatttttttcctcagcattcactgaccaaacattataaaaatgttaaaaagtcacttatagaccccaaaaagttctatctacaaggagagctcatgagtggcctcatataataaccaggaaaacctttaacatttgcaaatgccatgaaacaccaaaaaacaagataatcacagtatgataaagggtgcaagacctacagagtctactgcatctcattatggtcaatgtgttcagaaagagtgacattttgttggcatggagacaaatgtctcctaaagtgaaaggtcttctccaagcgtgtgtggatactttcgacttttgctgtagtccctaaacatgtaggtggcttcaactttaagtcagatattcaaacctgtgaataacgggactaattgtttgcatttaaaaggcttcaattacggctttttatttcttgagtgtgtgtttgtgggatagatagatagatagatagatagatagacagatcgatagatagataatagatattaagcattttggaagataaaaaaagaataaagccgagaaaagcgttcataatcctactactgtaagagagctactgtaaatatttttgtcaattgtgtactattatttacatccagtctattttctacaaagaatatatttttaaaaattgctgtgaatatactgtatacaaatattatatagatatataatatgcatatatctctatatacatattctacttctttccactttacatattaccataagtatctttcaattctaatttttcgaaattagttgtattgtaatttacttaatcattcttcatccaacattctttcttccagcctagtcatgataggacatgtaggttgttcaaattttttgttgttagaatacagcgctaggatgcatatactcattcactgatttttcctgtatgttgaattatgcattaaagatagattcctagaagtggaatctctgggtcaaagggtctgcttatatttatgattcttggtatatgtggccaatatatctgaaaaagtcatactaatcaacacagtaggacctagtctcactgcacttcaccaagagttatttaaatgttggctttcacagtgaatataagtgttagttcaaagatcttataactacttggcagagaggccaatagatgtcagaaaacatgaagggaagaagagaagagacacttaaaactcaagtgcagcattagaagtaaaagccattgataactgacaattggttagaaattaaaaaagcatctttgaagtcataatgtacatcaatacaataacaggcctcagtttaccaaagtggatactgcaacaaaataaatgattcggggtgaactggtgatgggaatcagctctgccaccaatttgctaagtggtgtttgcaaattgctttcctctctggacctttctcaactgtagaactggtaagccgaaagatgaagatagatgctttcagaatttagagaattgggttgtactcagataatgcagacaaactcatagggttaaggggtctgataggagcttctcctctgtagacaccgagactcataactctgatgagatccacagttctattggagttgtgcaatgaaatagcagacactcttggaatctcttggggctcccccaacttcatgaatgaatctctaagttctgcatgccccatataaactgatgacaagatctttgagagcactgtttccttagtgggtttccacagagaaattttgaatatgggggtccacgaagtggcttgagccatctaccccaacaacaacatttggcctttggtgcctctctagtattctcctgatggttatgcagatggtggcatacagaaatggagtaaattagtaaactaaaagaataaatgaggtgccccatttctctgactctattctaggaaaatgagtgagaagcaggatctcccagatttcaggagagatctgggtcactttttggaggtttctggtattgaaaattatatatatatatcctccagctgtatatatatatatatatatatatatatatatatatatatatataacatctctatatgatatacgtatctatctatacctctatagatatctatagatatctatctatatctctatatgatatatagagatatagatatctcctccaggtaatagacttaatttttaagaacatgtttcaattcacagaaaaattgagcagatggtacagagaataaccctgtgcccagtttcccctatgattaacataatacattatatggtacacgtgtaacagtgaaacaatatcggtacattattattcactaaagttcatcattgattcagatttgtctaggttgatcttatgtctttttgtggccaattattccatctaagattcgacattatattaagttgtcatgtctccttaggctaatccttgcctgtgacaatttctcagactttccttgtttctgatgaccttgatgggcttgaggattactggttttttgtaggacgcccctctactagaatttgtctgatgtttttcttatgattagactagtattatgagagcaggaccacagagagaaagaacaattttcaccacatcctatcaagagtatatactatcaagatgatttatcattgttgatgttggtcttaatcccctggctaagagagtgtttgtcaggcttctcctaagctattttcccctgactacctttccatacggaatatactccccgggaagaagttactatctatagcccacaattaaagagtgtgggtttctgtttctcctccttaaggccggcacatgtctataaattatttggaatccctgtgcacatctatataaataaatttggaattacgggatgtttgtcttttctctctggtttattaatttacttaataatttatttataatagtatggactcattactttttttttttttttttttttgagaaggagcctcactctgttgcccaggctggagtgcagtggcacaatcttggctcactgaacctccgcctcccgggttcaatggattctcctgtctcagcctcccgagtagctgggattacaggcatacgacaccatgcccagctaatttctgtatttttagtagagacagggtttcaccatgttggccaggctggtcttgaactcctgacctcaagtgatctgcccacctcggcctcccaaagtgctgggattacaggtgtaagccactgcacccagccctggactcattaatatttattttatactttgggttataatgtaaaacactattctattttgttgctcaaattgttgcagctttggccactgggagctcttcaagtggctcctgtgtctttttgaaatatccctcaccaatgtagttttgtttttgaataattccttactttaaggtgctacaagatctttcattctcatttgtgtatttcctgccccagttttagaactcaacaatttctccaagaagccttggttccagctgctgagaaatggcattaaaactgagaccagcctggccaacatggtgaaaccctgtctctactgaaaatacaaaaactagccgggcgtggtggtgcagggctgtaatcccagctactcgggaggctgaggcaagagaatcgcttgaacccgggaggcggaggttacagtcggctgagatcgcgccactgcactccagcctgggcaacagagtgagactctgtgtcaaaaacaaaaacaaacacaaaaacaaaacaaaactgagctctgagcaccaggtgtgcttgttgctacgacaaatatatttcaaaccttatatttttaacaccagcacccacacaactacaatacaattgcactattcataaaacaattatagattattaacaacattcaatcatggtgtcataggagcctgtggtcctacactggatcccacacacaaaacttgcatatgatggtcatcttctttcagtcctgttaggattgaaagagagatgtatagcctcagtggagataatatcaaaagtctaattttatttatttatttctttctttattttgagacagggtcttactctgtggcccaggctggagtggtgccatcatagctcactgcagcctcaaattcctgggttcaagaaatcctcctgcctcagcctcccaagtggctagcactacaagtatgtgccatcatgcctggctattttttttttcttccgtttttttagagacagggtctacgttgcccaagctggtcttgaatccctggtctcaagtgatcttcccacctcagcctcacaaagtattgggactacagttgtgagtcattgtgtctggcccaaaagtccaaatttgaggccttctttggatgtgtggccacaataaatggctcttgcaaggctgccaaccccttacactctttccataatatgccataagaaaagcatactggatttagaaatagggcatgaaagttctgaatccagctgtgttagtgttatagcatatatagcaagtggattgtgtctgggcctcaatttccaatgatacaaaatcaggaacatcagattggataatggctaaaggccctcccagttctagcacactataattttcaacagacttacactgggggaatacaattggctccactagtctttgtatacaggcctaatattccagaaagtctaaaccagtggaggcatgggggtgcggaggtcgcggctaataaatcagagtcattttattattttttgggaatgccaagacctgttaaaggctttagatagtctagacaatcgggcctgagaaactttagacctttctttttaaagaatgaagatcaaaaaagtataaaaaatattgatggaaagtatctctttcattggtttcatgttctgatagatcaagacttcttcctcttttttttttttttcctttagtaagggaaaactcctcatctgctttttcctctgacttcaaataattacctttaatgcagtgatggctgagccacctctaagtttcttaccaggaatctctctctaggtttttatttttttctttttctcttccttccttctct

SEQ ID NO: 285 - DNA, 871 bp, Homo sapiens
ctgccaggcagtgcccttcccggagcgtgccctcgccgctgagctcccctgaacagcagctgcagcagccatggccccgccctgggtgcccgccatgggcttcacgctggcgcccagcctggggtgcttcgtgggctcccgctttgtccacggcgagggtctccgctggtacgccggcctgcagaagccctcgtggcacccgccccactgggtgctgggccctgtctggggcacgctctactcagccatggggtacggctcctacctggtctggaaagagctgggaggcttcacagagaaggctgtggttcccctgggcctctacactgggcagctggccctgaactgggcatggccccccatcttctttggtgcccgacaaatgggctgggccttggtggatctcctgctggtcagtggggcggcggcagccactaccgtggcctggtaccaggtgagcccgctggccgcccgcctgctctacccctacctggcctggctggccttcgcgaccacactcaactactgcgtatggcgggacaaccatggctggcatgggggacggcggctgccagagtgagtgcccggcccaccagggactgcagctgcaccagcaggtgccatcacgcttgtgatgtggtggccgtcacgctttcatgaccactgggcctgctagtctgtcagggccttggcccaggggtcagcagagcttcagaggttgccccacctgagcccccacccgggagcagtgtcctgtgctttctgcatgcttagagcatgttcttggaacatggaattttataagctgaataaagtttttgacttcctttaaaaaaaaaaaaaaaaaaaaaaaaaaaaaaaaaaaaaaaaa

SEQ ID NO: 286 - DNA, 639 bp, Homo sapiens
cggagcggcctggctaactcctgccaggcagtgcccttcccggagcgtgccctcgccgctggtacggctcctacctggtctggaaagagctgggaggcttcacagagaaggctgtggttcccctgggcctctacactgggcagctggccctgaactgggcatggccccccatcttctttggtgcccgacaaatgggctgggccttggtggatctcctgctggtcagtggggcggcggcagccactaccgtggcctggtaccaggtgagcccgctggccgcccgcctgctctacccctacctggcctggctggccttcgcgaccacactcaactactgcgtatggcgggacaaccatggctggcatgggggacggcggctgccagagtgagtgcccggcccaccagggactgcagctgcaccagcaggtgccatcacgcttgtgatgtggtggccgtcacgctttcatgaccactgggcctgctagtctgtcagggccttggcccaggggtcagcagagcttcagaggttgccccacctgagcccccacccgggagcagtgtcctgtgctttctgcatgcttagagcatgttcttggaacatggaattttataagctgaataaagtttttgacttccttt

SEQ ID NO: 287 - DNA, 1678 bp, Homo sapiens
acgaggtgcgggacggaagagggggtgaaggccagaggctcggggcttcaagaccgctgtctggagtccccctttccaggccatgtcggggcccacctggctgcccccgaagcagccggagcccgccagagcccctcaggggagggcgatcccccgcggcaccccggggccaccaccggcccacggagcagcactccagccccaccccagggtcaatttttgcccccttccatctgagcagtgttaccaggccccagggggaccggaggatcgggggccggcgtgggtggggtcccatggagtactccagcacacgcaggggctccctgcagacagggggggccttcgccctggaagcctggacgccgagatagacttgctgagcagcacgctggccgagctgaatgggggtcggggtcatgcgtcacggcgaccagaccgacaggcatatgagcccccgccacctcctgcctaccgcacgggctccctgaagccaaatccagcctcgccgctcccagcgtctccctatgggggccccactccagcctcttacactaccgccagcaccccggctggcccagccttccccgtgcaagtgaaggtggcacagccagtgaggggctgcggcccacccaggcggggagcctctcaggcctctgggcccctcccgggcccccactttcctctcccaggccgaggtgaagtctgggggcctggctataggagccagagagagccagggccaggggccaaagaggaagctgctggggtctctggccctgcaggaagaggaagaggaggcgagcacgggccccaggtgcccctgagccagcctccagaggatgagctggataggctgacgaagaagctggttcacgacatgaaccacccgcccagcggggagtactttggccagtgtggtggctgcggagaagatgtggttggggatggggctggggttgtggcccttgatcgcgtctttcacgtgggctgctttgtatgttctacatgccgggcccagcttcgcggccagcatttctacgccgtggagaggagggcatattgcgagggctgctacgtggccaccctggagaaatgtgccacgtgctcccagcccatcctggaccggatcctgcgggctatggggaaggcctaccaccctggctgcttcacctgcgtggtgtgtcaccgcggcctcgacggcatccccttcacagtggatgctacgagccagatccactgcattgaggactttcacaggaagtttgccccaagatgctcagtgtgcggtggggccataatgcctgagccaggtcaggaggagactgtgagaattgttgctctggatcgaagttttcacattggctgttacaagtgcgaggagtgtgggctgctgctctcctctgagggcgagtgtcagggctgctacccgctggatgggcacatcttgtgcaaggcctgcagcgcctggcgcatccaggagctctcagccaccgtcaccactgactgctgagtcttcctagaagtacctgctgggttctcagttccagttcccatcctttgattgatcactctccctgacatccacctgtatgactttgtcaccaaatgctgtcttctctttctccaatcaagaaataataatccctcgagtttacaaaacaaaaaaaaaaaaaaa

SEQ ID NO: 288 - DNA, 31737 bp, Homo sapiens
gatctgctccaggtgaccttccttgttttggttccaattttcattacacttggcagatatttcttatggtcaattatctgggctgtagccattttctattttcattgcagataagagcttcttttctactactcattttactgttaattttggtatattcaggaaaggaatgagtaaacatgcctttactgtaccatcttttatgggaactgctcatccttaatctctgtcttcttcagctttgctggtgtgacttgctcttgatttttctcctactgctgtgctgtttctcaggctccttttccggctcctgcacctgcctgtaaattctgctattccccaggactctctcactggcccctctccccacccaccccacccctattctataacgagctcctactctactttggggcctacagaggccaggcagataatgtgattaagtgaagggaaatatcatttattttttcttctcactattgaccttggcagagtcatttattttttcatatggtgtcttcaatagaagcttttttcataacaatcttgtaggaatattctttatttccataaagatataggttctctccaactttttttttttttttttgagacggagtctcgctctgtcacccaggctggagtgcagtggcacgatcttggctcactgtaacattcgcctcctgggttcaagcgattctcctgcctcagcctcctgagtagctgggattacaggtgcctgccaccacgcctggctaatttttgtatttttagtagagatgggatttcactatgttggccaggctggtctcaaacccctgaccttaggtgatccacctgcctcggcctcccaaagtgctgggattacaagcatgaaccaccgcgcccggctatgttaggctattcttgcgttgctctaaaataatgcctgagactggataatttataaagaaaagaggtttaattggcttatggctctacaggctgtacaggcatggtgctggtatttgcctagcttctggggaggccttagggagcttttactcgtggcagaaggtgaaggaggagcaggcatgtcacatgaccagagcagaagcaagagagttagagtgggaagtggcacacacttttaaaacaccagatcttgagagaactcaatcagcaccaaagggatcgtgctaagacattgatgagggattcgctgtcatgatccaaacacctcccaccaggccccacttccaatattggagattacaattcaacatgagatttggtggggacatatattcaaactacatcaggggtctactagagaggggagggaggcagacaagggttgaaaaactaccttttgggaactatggtcattacctcggtgatgggatcaattatccccaaacctcagcatcattcagtatacctatgtaacaaacctgcacgtttacccccgaatctaaaataaaaattgaaattattaaaaaaaagataattgtaagtcgcttcaaaaaaatcctgtgtaggccaatatgacataaggcgaaccaaatagatttgctggccaggtttggccataggccacaaatttagagcctctggtttgacgtgttttatctcagtggccttcctttctgacggcttcacttgtgtggtgggaggctgagggtggcgacttgggattcatgtatttctgctctcccttgtgaaggggtgaggtgggattatgagtaatttatttgcatgaggcgcctcttgggaaataactcacccaaagagaagaaggcacgtggcaggatacgctcaactcggtaacaaaaatctcagggtcagagttgacgtgtggctctcctgcattgtactgtaactctgggagggccaggactgtgtccattttgtttacaccgtatagggtaagcatagagcctggcccaactgtagatactcaatgagtattggctgactgattgaattcatattactgccctgtgcatgtcccctaatttgatgttcacctcaaccctgatgaattcatgtctggatcccacaggccatatgtaaaaaatgcaggaatcgtgtcactgaaaactcagaaaggcattgggaatgctttcacactgccttggtgctccctaaaaagagtaaccaaaaaataaaaggaagtgttttcctcctctccattcctttcctcactctacactgctgtgcagctttagtccttgtgggcttctgtgtaatggcgggggcctcccaccaggagatgacactgctggggtgttctggtcctcactgtatagtgtggaaggtgctgggtgctaacagacagatgtgtttatgaacacggggctggagagcctaagtgggtggaagaagagagccagagaaacgttaataggaccccaggtccacccacaggatggaaaaatatgcattatacttggagtttgtggaagaggccactagctgctcaccaaatcctaattttctcatgtttctgggtacacatcctgtggttaggtgtggcctgtggttgggttccagccaagagaatatgagtagaagttatgtgtgccacatgtaggcctggcccatacaaacctcctactgtgtgactgtccatgttcttttctctccttgaccctgggaggaatgtgctgaggatggcagggcctttgctgtcctcctgggtctgtgaggggtgagccccactgaccattcggaaccattttggacattgtgtgtggggggaacaatacacttccatggcaggcacaatggctcatgcctgtaatcccagcacttggggaagtgggagcagggacatcgctggagcccaggagttggacaccagcctgggcaacatagcgagaccctgtctgtattaaggaaaaacaaacaaacacttccattatatttgagccaaaatagtttttaggtgtatttgttattgaagtgagcctgcctgactagtccagggactcagcacctgctactaggtacatctgcaacatgggcgttcaggagtggaagtggaggctcagaggccactgaagattttgagaatactcgtcagctatgacaaggcacaaggtgaagcgatgccttgagccagcgtggggtgcttggaaggattttcaaaagggaaggaaatatgaatgcagcttgtagagctttctaggaatagcagcaggaaatgcagcttcctgtaaagtgatctttaagccctctaatttggacacagaattcaaaaaatactgaagttcttcctagagaaagagttgcaaagtgtgtgacaaggaagcagtccaatctatttctgaataatgaaactgccctacaatttagtgcttaaaacaacaacgttcattttgaagaattatctctcatggttctgggtgctcacaaggctcagagaggtggttctcagagcgtcttctgtagctgcagtcaaaaggggctggagtcatcttgaaaaggtcttcactcagatgtttggtactgaattcatgctaattgacagctgcaacctcagtgggggctcaaccagaaccccaggacatggtctgggcttccccacagcatggcatctgggttctaagggtgagtgtcccaagaggactggacagatgcaggattgcccccaccttccctccccttccctcccctccccttcctttccttttcttccttcctttctttttcagagtctcgttctgtcacccaggctggagtgcagtggtgtgatcttggttcactgcaagctccacctcctgggttcacgccattctcctgcctcagcctccggagtagctgggactacaggcgcccaccaccacacccggctaattttttatatttttagtagagacagggtttcactgtgttagccaggatggtttctatctcctgacctcgtgatctgcccgcctcagcctcccaaagtgctaggatttcaggcacccaccaccatgtgagttaattttttgtatttttagtagagacagggtttcgccatgttggccaggctggtcttgaactcctgccctcaggtgatccacctgcctcagcctcccaaagtgctgggattacaggcgtgaaccaccgcacctggccaggattaccttttcttttttccctcccctctcctcccctctcctctcctcacctattaagctaggaagtctaaggattgccttttctaatctaactttgaaagtcaaacagactccactgtgttctctattggttgtagcaatcacaaattcccaagccacattcaagggaagaggtgacatagaccccacctctcaatgggaggagggtcaaataattttgggacatgtttattttttattttattttttttgagacagagtcttgctctgtcgcccaggctggagtgcagtggcgcgatgtctgttcactgcaggctccgcctcccgggttcacaacattctcctgcctcagcctcccgagtagctgggactacaggcgccagccaccatgcccggctaattttttgtatttttcttttagtagagacggggtttcaccatgttagccaggatggtctcgatctcctgacctcgtgatccgcccgccttggcctcccaaagtgctgggattacaggcgtgagcccccgcgcccggctgggacatgtttattttttaaaaagcttttagtttaggttcaagggtacatgtgcaggtttgttatgtaggtaaacttatgtcacgggggtttgttgtacagattatttcatcaccaaggtactaagcctagtacccaatagttattttttctactgctctccctcctcccacctccaccctcaagtgggccccattgtccgttgttctcctcttggagtccatgtgttctcttcatttagctcccacttatatgtggtatttggttttctgttcctgtgttagtttgctaaggataatggtctctaactctatccatgttcctgcaaaggacatgatctcattcttttttatggctacatcaatttaggttgattccatgtctttgctattgtgaatagtgctgcagtgaacatatgtgtgcatgtctctttatggtagaactatttatattcctctgggcatatacccagtaatgagattgctgggttgaatggtagttctcttttatttgagacagagtttccctttgttgcccaggctggagtgcagtggtgcgatctcggcttactgcaacctctgcctcccaggttctaagagattctcctgcctcagcctctggcgtagctgggattactggcgcacatccccacgcctggctaattttgtatttttagtagagatggggttttgccacgttggccaggctggtctccaactcctgacttcaggtgatccacccgccttggccccctaaagtgctaggattacaggcgtgagccaccgtgcctggctggtagttcttgttttagctctttgaagaactgccacactgctttccacaatagttgaactaatttacactcccaccaacagtgtataagccttctcttttttctgcgaacttgccagcatctgttatttttttgacttttttttttgagacagagtgccactctttcacccaggctgaagtgcagtggcatgacctctgcccactgcaacctccgtgtcctgggttcaagcgactctcttgcctcagcctcccaagtagctgggattacaggccttgccatcgcacctggctttttttttttttttttttaagtagagatggggtttcaccatgtgggccaggctggtcttaaactcctgacctcaagtgatccatctatgttgacttcccaaagtgctaggattacagatgtgagccactgtgcctggcctactttttaataatagccattctgactggtgtgagatggtatctcattgtggttttgttttgcatttctctaaagatcagtgatattgagctttttttaaagttctttggctgtgtgtgtcttcttttgaaaagtttctgttcatgtccctttgcccactttttaatggagttgtgtttattgcttgtaaatttaagttccttatagatgttggatattagaactttgtcagatgcatggtttgcaaaatttttgtcccattctttagattatgtgtttaccctattgatgttgtcttttgctgtatagaagctcttaagtttaattagatcccatttgtcaatttttgcttttgttgtgattgcctttggcatctttgtcatgaaatttttcccagttcatgtgtccagaatggtattgcctaggttgtcttccagggtttgtacagttttgggttttacatttaagtctttaatccatcttgagttgattttcgtaaatggtgtgaggaaggggtccagttttaatcttcttcatatggctagctagttatcccagcaccatttattgaatagggagttattttgccattcttgattttgtcagctttgtccaagatcagatggttgtaggtttgcatccttatttctgggctctccttatattctgttccattggtctatgtgactgtttttgtagcagtaccatgctgctttggttactgtagccctgtagtatagtttgaagttgggtaacatggtgcctccagctttgttctttttgcttaggattgccttggctatttgggcttgtttttgggtccatatgaattttaaaatagttttttctaactctgtgaagaatgtcattggtagtttggcaggaatagcattgaatctgtaaattggtttgggcagtattggccattttaatgatattgattctttctatccacaagaatggaatgattttcaatttgtctgtgtcatctctgattttttagagcagtattttataatactcattgaagagatctttcaccttcctggttagctgtatatattcctaggtattatgttctttttgtggcaattatgaatgggattgcattcctgatttggttctcagctaggttgttgtttttgtataggaatgctggtgatttttatatgttgattgtgtatcctgaaactttgctgaagttatttataagcttaaggggttttgggccaagactatggggttttctagatatagaatcatatcatctgcaaacagggatagtttgacttcctctcttcctatttggttggcctttctttctttctcttccctgattgctctggccagtacttccaatactatgttgaataggaatggtgatagagggcatccttgtcttgtgctggtttttaaggggaatgcttccaacttttgcccattcagtatgctgttgattgtaggtttgtcataggtgactaattattttgaggtatgttccttcaatacctagtttattgagagatttttttttaacatgaagtgatgttgaattttatcaaaagccttttctacatcttttgagataatcgtgtggtttttgtctttagttctatttatgtgatgaatcacatttattgatttgtgtatgttgaaccaaccttgcatcccagggataaagcccacttaatcatggtggataagctttttgatgtgctgctggattcagtttgcaagtattttgttgaggattttgcattgatattcatcaaggatattggcctgaagttttcctttttttcttgtgtctctgtcaggttttggtatcaggatgatgctgattgcatagaatgagttggggaggagtccctcctcctcagttttttgggttagtttcagtaggaatggtactagcttgtcttcatacatctggtataaactggcaataaatccatctggacctgagcttttttgtagttggtaggctatttattactgattcaattttggagctcattattggcctgttcaggcagtttgttcctggtttagtcttgggagggtgtatgtgtccaggaatttattaatctcttctaggttttctagtttgtgtgtatagagatattggtagtagttttttgctggttgtttgtatttctgcggtgtcaatggtaacatcccctttgttatttctaattgtgtttatttgaatcttctctcttttcttctttattagtagcctatctatcttattaactttaaaaaaaaaaccctcctggatgcgttgatctttgaatggttttttgtatctcaatctccttcagttaagctcgattttggttatttcttgtcctctgctagctttggggttggtttgctcttttctagttcttttggttgtgatgctaggttgttaatttgagatctttctaacattttgttgtgggcatttagtgttgtaagtttccctcttaacactgccttacctgtgtcccagagatgctggtatgtggtatctttgttctcatttgttttaaagaacttcttaacatctcccttaattttattatttatttacccaaaagtcattcaggagcaggttgtttgattccatggttttgagtgattttttaaagtcttggtttctatttttattgcattgtggtctgacagtgtgtttgttatgatttcagttttttgccatttgctgagaattgttttgtgtctgattgtgtggtcaattttagagtatgtgctatgtggcaatgagaagaatgcatagtctgttgttttcgggtggagagttctgtagatctctatcatatccatgtggtccaatgctgagttcaggtcctgaatatctttgttaatttcttgccttgatgatctgtctaatactgtcagtggagtgttgaagcctccaactattattgtgtgggagtctaagtctctttgtaggtctctaagaactcgctttatgaatctgagtgctcctgtgttgggtgcatttatatttaggatagttatatcttctggttgaatttaacactttaccattatgtaatgccccggtcttttttgattgttgttggtttaaagtatattttgtctgaaattagaattacaatccctgatttttttctgatttccatttgcttgatagatttttctgcatccctttatttcaagcctataggtgtcattgtgtgtgagatggatctcttgaagacagcatgagatcttgcttttttatccagcttgtcactttgtgccttttaaatgggggtatttagcccatttacatttaaggttattattgatatgtgtggatttgatcctgtgttgttagctggttattatgctggtttatttgtgtggttgctttatagtgtcactagtctgtatacttaagtgtctttttgtattggctggtaatggcctttcctttgcatatttagtgctcccttcaggacctcttgtaaggcaggtctgatggtaacaaactctcagcatttgctgatctgaaaaggatcttatttatcctttgcttaggaagcttagtttggctggatatgaaattcttggttgaagattttttttctttaagaatgttgaggccgggcgcagtggcttgtgcctgtaatcccagcactttgggaggccgaggcgggcagatcacgaggtcaggagatcaagaccatcctggctaacatggtgaaaccccgtctctactaaaaatacaaaaaattagccgggcgtagtggtgggcgcctgtagtcccagctactcgggaggctgaggcaggagaatggcatgaacccgggaggcggagcttgcagtgagccgagatcgcgccactgcactccaacctgggcgacagagccagactccgtctcaaaaaaaaaaaaaaaaaaaaaaaaaaagaatgttgaatacacgcctccaatctcttctggcttgtagggtttctgctgaaatctattagcttgatggggctccctctgtaggtgacctgccctttctctctagctgcctttaacattctttcattttgaccttggaaaatctgatgattatatgtcttggggatgatctcgttgtgtagaatattgcaggggttctctgtatttcctgaatttgactgttgacctctctagggaggtcggggaaattttcatggacaatatcctgaaatatgttttccaagttgttcactttctccccatccctttcggggatgccagtgatttgtagatttggcctctttacataatcccatatttctcaggagttttgtcattccttttccttcttttttctttatttttgtctggctatcttatttcagagtgccaatttttaagttctgcgattttttcctcagcttggtctcttctgctgttaatacttgttattgcattgtgaaattcttttattttttattttattttgtttttgagacaaaatctcactctgttgtccagactggagtacagtggcatgatcttggctcactgcagcctctacctcccaggttcaaatgattggcatgtctcagccacttgagtagctgggattacaggcgtatgccaccatgcccagctattttttgcagttttagtagaaaaagcgtttcactatttggccaggctggtcttgaactcctggcctcaagtggtccacctgcatcagcctcccaaagtgctgggattacaggcatgagccactgtgcccggctgcattgtaaaattcttgtagtgtgtttttcagctctatcagatcagttaggttctcttttttactggttatttcatctgtcaggtcctgcatcattttattgtgattcttagtttccttggattgggttttgccattctcctgaatctcaatgatcttcattcctatccatattccgaattctatttctgtcatttcagccaactcagcctcattaagaacccttgttggagaactagtgaggttgtttggtggacataggacagtctggccattggagttgctggagttcctgcattggttctttcttttctctgtgcgtgggtgctcctttaactgttgggctgcctctgattaaaggggccaggtaagggcgtggtggttgtgctggaatcccaggccagacagcccttcccaatgagcagaaggtacatgcattggcattcatcaagaaaacaactcgacccacagagaacagagaaaacaagacaggatgaccacccacccgggagtgacacctagtaacaacctcagttcaaaagtctgctgagggtgctgctttcagctgaaatgaacatgagggtgtggggaaagccctccttaggaagaaggctttttaggtcttagtgagtccaaaaaagaggagtggcagaagtcataaaagaggcacacgatggaaatgtctgtcctttttaatatcatggaggctgctagagttctaactagggagagctcaccaactaacaaggcactgaagagcccacagcttggggctcatggggacaaggtcaggagatggtgggaggggatgcaaatttagaagttccacctacgaggatcccgatatggcaagtacaaaatgcccaattaacctttttctacatgttttcttccaatggtgtttaagttcacaggacatagacttttttttttgacagggtctcactctattgcccaggctggagtgcagtggtgtgatcacagctcattgcagccttgacctccagggctcaagtgatcctcccacctcagcctcctgagtagctgggactacagacatgctctagcatgcctggcattctttcttttttttgtggagatagggtctcaccatgttgcccaggctgatctcaaactcctgaactcaagcaaccctcctgctttggcctcccaaagtattggtattacaggtgtgagccaccacacctggcccacaggacatggattctgaacaactggcataaatcgactggcctcaaggtaaggttttaaactaagcttaagcttttctgttgccctcagataccactgaatttcttcttcagattttggtgacattaagtggtggtttctggaaatacaattttaattttgcttgggatgattgtcttggggtctggggatagctcattttctaaattttgtggttgtggggctggtgttgcaatattcttgtgtctcattaactttctggaattttaaaaacagactcatggaaggtttgcctcagaactcagtctttgaagccttggaggaactaacctgttccagcccaggccgcagcttcggaagggaccacagctctgcccagggattggaaacccactagctgggattaaacagaacacaaattggaactgatagttttgtgactttaacatagacactttgggcttcaattacttttgactttaatgtcatagtttcagtttgcaatgggatttgaactttaattttggagtttgattaatgggagggttatttgttgttcaaatttgaaaatgggagggttatttgttgttcaaaacctttattgttggcaatcccttgttggagcttcttaataccatcatttaatctcattgtggatctccgatagctacttagataacatggctgcatgaaattttattttatttatttttgagacagggtctcactctgttgcccaggctggagtgcagtggtgtgatcatagctcattgcagcctcaaaatcctgggctcaagttatcctcctcccttggcctcctgagtagctgggactacaagtgcgtgccactatgcctgactaattttttgactttttgtagagatgaaatcttgctatgttccccaggctggtcttgaactcctggcatcaagtgatcctctctttttggtctaccaaagtgctgggattacagcactttggcatgagccactatgcctgaccaatgaaatttgaggtgggaaacggagcacccaggctgaagtgcaatgctgtggtcatagctcactgcaggcttgaactcctgggctcaagcaatcctcctgcctctcagcctcctgagtagctgggaccacaggatggctaatttttaaacttttttgtagagatgaggtctccctatgttgcctaggctggtcttgaactcccagcctcaagcgatcctcccgcctcagccttctgagttgctgggattacaggtgtgagccactgctcctggcaatgtatttcaatttcgtggcaaaattgcagaaatgaacataaaacacaggtgaggataggagagtctaacttttctggcaagatcgggcagtgttgagctccaaggaaaaggagaaggaaccctggacacattgataaggcgtcctcttttccttggtattaactgaagcatgctcttgatggggaggaagctgctgctactgctgccgtgtttggtgtttggagaagttaatatggtttgttatttgttaaaagcttactgagtaccaggtatatgctgaatgcttagcatacgttattttgtttaatcttggccacaatgggccctgacagtgatagctgtgtctgaagtaggtgctattattcccattttacacctgatgaagctggagctcagagaggcatagtaactttttcaaggtcacacggctaaaatgaaaggtaatgaatggtttgaattcactttggcacattcaatcaaccaatcctcagatactcactgagcgtgttgtatcagccattatttttagttgcaagcagtagaaaccaactctggctgagtttagcagaagatgaatttattaaagggaccctggattgctcatggaaattccaggggagctacagagccattgtggaagcttcccagcagggacaatggtcagaacctggctgccgctgctgccacttctttgaccatggcctggatgcttcggcttgcaatgcttacccactggggctggatgctgggtgctgctgagaactctacctcctctgtgatcttgctgtggccaccactgtccctacaggctctagggtccctgcttcctggcattactggctctggattgaaagcctgggcctctgatgaatggaacgtgtgtgcatgtgaaactgcctttgcaaagatgatgacagtgagggaagtctagcatgggtgactccatcttgcctctaccctcacaggctggctgtcctcactcattcctgggcataggccaagctaaccatgggaggaatttagtttacagtttaactctgaagcaaagatgatattagtccctccctaaaatgaaccccctcctagctcagggacctgcctttgtaaaactaatgaaaggccacaagattaggattatgggaggggcttgaattttgctaagatgtgggtgtagctaaccgatgaccagccattgacccctagcttgcctttctataatcctttgctgctcaggagtcatgcggccagaggtcacaagatctgtgacttccccaattgctcctatagataacatcactattgtaaaaccaaatattggtcttctgagatatttttcagacttttgcattctgaaatgattcatgactcaactggtcctgtgacccccacccagaggtggacttagtgcacaaggtctgttttctacactcctatgattttatccccaacgaatcagtagcacccattctctgctcttaccgcccaccaaattctccttaagaaccctagcctctgagttcttgtggggactgatttgagaaataaactcccatcctttcacttggctagctctgtgttgttaaactctttctctactgcaataccatggtctcagtgaattggttttgtctacgcagcaggcaggaagaacccttcgggtgattacaaattagcctgctccagagctgctggaggtgggggtgacacacttcttgtgcctgtgtcttctttcttgggaggtcggctctgttcccaagactgatatcatggggaactcctctaatgtggcaaagcagtttgaatgctgggcagccaggggagtcacagatggttgcatacacatctgtgttctgcatgacactgctagacatggcggacaataccaagacggatcagacccagcacctgtcttccgagaccttacgggctcatgattctcttccttttaacatgcacatttattaggtaccatagtgtgcaaagcttgttcactcgaattatttcattaggtccatctgatagtcatgtagggtaggcagaactgataggatttctgttttatatttgaagaaactaggtctgtcaatagtgagccaggtttaaaaaaaaaaagaaactaggaagttaggtgatgagcctaagacatcaccactggtgaggagcagagctgggacatgagcctatcttctgactccaggcccagtgctaagccaactaaaggggcataaaggggagctgagatcagggaaggctctgtggagtggcactgcccctcagtcccttgtctgcaattctaaaatccaaaggactctgaaaacaaagtctctgtcttttttttgtaatgggatctcattctgttgcccaggctggagtgcagtggtgccctctgcagcctcgacctccctggcacaagtgatcctcttgcctcagcctcctgagtagctgggactacaggcgtgtgtcacaatacctggctattgttttttgtttgtttgttttcaagtttgggactaaaactcaatttggcagcaaaacctgacccgaactgatgtgatttgtaatctttagttatccatttaccgtaagatcaatgtgtttagctgcagaaatcttaatgtttgttaatagggggttatcctggtccataaagggagggagaggaggaggtgttacctaatattgggtccatggactacatagcctaaaaaaatctataaaatttcaaaacacacctggcttcaagggttatggataagggagtctgggttggatctgaaagggggcttggttgtggggtagaatttcgatgtttggaagggatgtggagggatgttatgaagaggaagcctcacgccataccaccttgggtcttggtgttaagtcattatcaaccattacatttgctttaaagcagagatgacttacatttctgataactactttcccttaattcatgattcacacacatttggagggctggactttctgggtttggttatttcccctggtaccaatccccgccttttcccagaaatcacttgactttcccgaaaactcagaaacacaccctttggctgaaaaatagcattaagcaatcggtgaaattccccattcctcctttccccgctggagccctggatagagggctctctggcctgggaggaggacgctgtccttgtttcaaaagcagagggagctccaagatcaaggctgagtttccctaagtcatggtctcccagccccctctgtttagatcagggaatttcagacatgcacactcgggtagggaatcttatgaacagaaccaggacagggaggctggccggaggttcctgcagagggagcgtcaaggccctgtgctgctgtccctgggggccagaggggttgcccagcatgcccactggcaggagagagggaactgacccacttgctcctaccagcttctgaaggtaaaatccttacaaacgaggagcagagctttgatggaggaaaaaggaaaggcagaaaacttcacgtaggagggcttggggcaatgatagagggctgacaaaggcagcataaaaaaaggcagaatatagacaacctatttctcttaggctcaccccatccacccctacttcacccccttacctaccactgttttcagggttaaagcaattttagcaaccctttactaggaactgtggggagatagcttgtattttcagtaagttggcggtggggggcagggacaaactccaaacaaactctggaaaacgaatgtaggaagtttttatgttccttgtcatttggctgtcccttttctccttcctcgcacaaccctgtatcagtggggcagcacttccttctcagaccgcttgtcccagggtccctgccttcccctagtgaaagaagctcctgcctccatcggtgggcgttgggagcatcagcggagatgcacgcaatgataaacagcagacagggctgcttgaggagatgaggtgatcacggttaaagaagaggggctgtcctacatggatgatcatgatgcgccaagactgttgaaaacctgagtggaaatgggagcatcgttcttgagggcaggagagagactgataccgcgggggtggggctggtggaggacaatagaggaagaagaaaactgggagaaagtactcgattcctttggagaaaaattaggagaaagtctagagaagcaatgagggaaggatacaatttagctatagtctagaaagttagtcgaagttaactagggagggtgtgaggggcacggtgccatgtggggatgttggtgatatggccctgtgtgttatacctttgaaggtgacactgagccccaggtgacgccgcaccaccaaagaaggtgcttgtgtttgtcagacaaatacagccaggcctgccaccccttaggctccaaagtccggaggtgcagaaagccaggaccaagagacaggcagctcaccagggtggacaaatcgccagagatgtggtaagtgatcaagggtccctgagatgacacagactccattcccttcatcttctcaagaaaagcgctcaagggccaggcatgatggctcacacctgtaaccccagcactttgggaggctgaggcgggaggattgcttgagcccaggactttgagaccagcctgggcaacataaggagaccctgtctctattaaaaaaaaaaaaaattagcccagcgtcatgcgtgtcacctgtggtccctgctactcaaaaggctgaggtggtagaatcacttgagcgcgggaggtcaaggctgcagtgacctgagatcgcaccactgcactccagcctgggtgacagagtgagaacctgtctcaaaaaaaaaaaaaaaagggctcttgtctgaagcctgggttttggtttgacctgggccttttctttattccgacctaagattctcccccatggccgattgactgcctctcttcttccccctttcttctgcctctggcaaatagcgcgttctgtcctaggctactggtgcctggtcacccgccaatctatgcctctgttttttcaggtgcattgtcctgttttcacttttggcatgggtttatgctgagcctaccatgtatggggagatcctgtcccctaactatcctcaggcatatcccagtgaggtagagaaatcttgggacatagaagttcctgaagggtatgggattcacctctacttcacccatctggacattgagctgtcagagaactgtgcgtatgactcagtgcaggtatgttataagcacaaaaagaatagagatggaagactagggctaaggtagcggaataaggatgtgggagggagtgccacctgtactcacagtgaactggagtcaagtcctagtggcataaatgttctattctctctgtcccttcttttaactccataccaaaatattaccctttcctagattttttttttgtgactcttctcttagataatctcaggagacactgaagaagggaggctctgtggacagaggagcagtaacaatccccactctccaattgtggaagagttccaagtcccatacaacaaactccaggtgatctttaagtcagacttttccaatgaagagcgttttacggggtttgctgcatactatgttgccacaggtaaggctcacccttctgcatgtgccttattgacccagctaaaagattagaaatgagaaatccactgagcaacacattgaatgaggattctgttcgtaattcttataaaaagtgttgacttggcctgggtcgctccataaatcacttttgtgaaattcaaatgcatgatcatatcttagtggtgatgatgatcatggtaataacacatagtacataataaacagcaatttgttgagagccactataaactgggtatgtattggggattggggatttttcctattttaacacaatcgtcactttaatccttcaaggtaggtattatttgctccatataaagatgaagaaaataaggactaggaaagttaataacttgccaagaatcacacaaggaatgtgtagtatttaaacccattcaatatatggcattcaaaccttcaaattctgggtacttctgtatctctctctaggttaaaatgaagctaggacatctcataaagccaaactattgtttagatttgacagaaggaccaacatcatataaagcaatgaatgtactgattcctccctgcagaaggcatcgtcatgatgtttaccttgcagagtgtcattcctggagctgaaatgctctgtacatgagaaaagtcaaggatctctgacattaagagctgcctaggccgggcatggtagctcacacctgtaatcccagcactttgggaggctgaggcaggtggattaccggagcccaggagttcaagaccagcctggccaacatggtgaaaccctgtctctactaaaaatatgaaaaattaaccaggcatagtggtggtgcgtgcttgtgttcccagctcctcgggaggtagaggcgtgagacttgtttgaacttgcttgaaaatgtggaggttgcagtgagccaagatcccaccactgcactccagcctcggtgacagagtgaggctatgtcacttacacacacacacccccgagcttccttatagctgtgtagtggtagggctcaactctggaatcatatgtcaggagagtaatatggaataatagtagcctgaaatgtgatcccttgacggatctttaagcaataggcctttcctactttttcttacccttatggttttggatttaacctcattctcccttcttggtgtttgttcttgacctcagcctctttctactctttgtagacataaatgaatgcacagattttgtagatgtcccttgtagccacttctgcaacaatttcattggtggttacttctgctcctgccccccggaatatttcctccatgatgacatgaagaattgcggaggtgagcttggtgttaagagggttgcatgttccctgggatttggaatggctgaggcctcagaaagggctttgtccacccttccaacttcgattaggccaagccttcatttggcacttcttttttattttagaatttatttatttatgtattatttttaataatttcaatagttttgggggtactggtgtttttggttacatggatgagttccttagtggtcaattctgagattttagtgcacttgttacttgagcggtgtacactatacccagtgtgtagttttctcgcccctgtttcaacctcctcccacgttgagtccccagagtccattatatcactctgtattggcatctattcttagttactcataagctgagatgaagccacaagaaggaggaagataagactatagggtaaagttagttaattggataagagagatagatgcctgtaaagggtctactgggggctgttcataaccagaaaggctccatcctaagcaaagtgatggaaacctaatagggattgggtattcctactgatacgtattgcacgtgtaattgctctatccctccagttagggcagggatctcaggttagtttgaatgcaggactgtcagtttctgagagaaggaatcatagaatagtgcaggaattcctttgcttgaccctgtatttgattctccctttctctttttctctgttagttaattgcagtggggatgtattcactgcactgattggggagattgcaagtcccaattatcccaaaccatatccagagaactcaaggtgtgaataccagatccggttggagaaagggttccaagtggtggtgaccttgcggagagaagattttgatgtggaagcagctgactcagcgggaaactgccttgacagtttagttgtgcgtgatggttgattaataccccacccttaacttacacagagagatctctccctgaagacaaatttttttttcatacagcatctttctctgttgctcaagctggagtgcagtggtgcaatcacagctcactgtagccttgatctcttgggctcaagcaagcgtcccacctcagcctcctgagtagctgggcccacagacgtgtgtcatcaaacccagctaatatttttattgttattctttttttttttacagagatggggttttgctatgttgctcaggatagcctgaaactcctagcctcaagcaatgctcccacctcggcctcccaaagtgctgggattataggtgtgagccactgcactcagcctgaagataaaattatcttttctcctgacccttattttcttcttattttatgtgacatttaatgcctcttttatttgtatctcccacttcccaattttacctcttccctttagttctttccctcttctgatttcatcattttgttcagtttgttgcaggagatcggcaatttggtccttactgtggtcatggattccctgggcctctaaatattgaaaccaagagtaatgctcttgatatcatcttccaaactgatctaacagggcaaaaaaagggctggaaacttcgctatcatggagatcgtgagtaacttagaagtgcctctttggttggtgataccaaagtccccaaacaatgtgggatcaaagcaggtagatgatccaggcacactggaagcacctgtgatctcagctaccgagggaggctgaggcaggaggatcccttgagcccaggaagtaggagtttgagtccactctgggcaacagagcaaaaccttgtctctaaaacaaaacaaaaacaaagcaacaataatttaaaaaacagatagattgttgttctgatagaatcctgagatacttcacttcttcaggaaaatctaaaccagtcaacggttgctagaaatgcctcaacctctagtaatcctttaactagacctgagactgcagacagcttgcgggtggttagttggtaatgccatatgattttagacatctgctgtattggaatgttaagcatcaggattgaggacaactggacgattttagaaagtgtgagaatgatgtaaatagaatgagagtcttcaactatttagtaattttttcctcctgtcccaacttctgttctttcaagcaatgccctgccctaaggaagacactcccaattctgtttgggagcctgcgaaggcaaaatatgtctttagagatgtggtgcagataacctgtctggatgggtttgaagttgtggaggtaaagtaccaccttggcttctccccagtccctggccccagatcaggatgagcggactgaaattgtccagttgtttacccaatgtatgtgtgtgatcaaggtataacacctttcccataaacacaacagcttaagatctgtagttctcccttgtgagtcatggagctgcctggccagcttggcattctctctgccttcagtcttcttgaggaaggggagttgacacgttggggcaaagctttctgtcagcctcatctcctgggtgctttaggtctgctaagatgttcccaagcttcttgtggtgaggactcctcattgatccaaggccagagatcaattccagttttgattttggtttcccatatctctcttcagaaataagtggtgatgtttattattctccagggacgtgttggtgcaacatctttctattcgacttgtcaaagcaatggaaagtggagtaattccaaactgaaatgtcaacgtatgtgtctcttcaaagtggaagtctttctttttctctcagagagaatggaaagatcagcacatcaaaattcaaatgcatggtttcctcttaggcatgtgagggagtgggttgggtttttgaagggaagccagtcatggaagcttttctagtcccagccccgcatctggtcccaggccaactagatcggcatgtttctttccaagaaaggggctatgggataggtcgagttagtagccccacgtgggtgcatttgtggcttccactgggccttcaccaaccactgagaaccaggctcttcactacggctttcatggggccatctgaattggcatctcagcgggtgagggagctgagagatgccagttggggaggatggccacagagaggctggtgtggggaggttcatcccaggtgtgcctgtggatatggggtggggaagcagtgaggatgaacctggccccatgactcttccttggaggaagtggctgtcctgaccatcgctctccttccttcgtctggtagctgtggactgtggcattcctgaatccattgagaatggtaaagttgaagacccagagagcactttgtttggttctgtcatccgctacacttgtgaggagccatattactacatggaaaatggaggaggtggtaggtttcttctactggagaagagagagagagagtgagaaggtgttggagggtggatagcataatctgtgccagagacagagtttggagacaaatgaaggcgataggacagacattgttcatccccttggcttcgtccaaagatacagttttcatctggagcagggcaagttcaggggagcatcagcctcagggaatcatagaggtcaccaactgagttcacagctgcagcaggaattcccctacaacatccatttcatgggattacccaccttttgaccagttatttcatgtaaaacccacaggagcaatgccttcagctttaagccaccaaactacactgactggctttcttgatgtagaggctttggtcatgctaggtgcagggctgaatgagaccctaatacgttctctgcattgctctgtatttatttcgccactttcccgatgccttctttccttctgctttggagatgttccctttgtctccctggcaggctagaggcctgagggattgtttggaggaagatattttttttctggctgatttaatctgatttactacttgaatcctagacgagctgaggttctgaaggaacggggcagggtgttggggtcggaggggggaatggaagaaggaagatgtggtggtgagtgtggcctgtgttctctgtgctattccaggggagtatcactgtgctggtaacgggagctgggtgaatgaggtgctgggcccggagctgccgaaatgtgttccaggtaaggagggctgaggcttggggagagatgatagccatgggtgactgggagtcaccttctgaaagcaactgtaatcctcttgggaaaggactgaacagtgacctgccagagtccagctcagtgaggtggcagtatcactgtgccgtgggctgccagggccgtggggaacctcctcagccgcactgaagccaggccaactggaaggaaatagaaacgtcagccagcgacagttggtgtctggtaatgtagctgcagtgagaagatacagaactgctaaaaacagggcctgaaagctgagagtgtgtgagtaatcaacactcagaaacaagtctagctaaatagcctagttattatattaaaagtttatagggcagcaagatatagaggaattcaaagaatgaggaagataagagttgggtagcagaaggctgaggcaaatccaataggataataaccatcctgggtggtactgaaagctgaagactgagctgatttgttgcatttattatctcattcgtgtccgtataacagccctgtgagctaggtgtcattggtcttatctgaccaatgtcaaatgtgaatgggtggggtgcaagttcacagagttagcaagtggcaaaggcaggctttgagcccaggtctgtctaagttcacagcccattgtgctcaacttggagtccctccaggctgtctagtaagggatttaagtaagcagcttcacttgaattcagttattagtataactgaatggtaatggcaccagtcactgggagtgagaggtcagggccaaagaagggacccctctctacttcctaggctgacctgtggtttactaggagggactcaggtgcaactaggactccagtaaagaaggtgattaaagtttgatctgggcatctgaagaaggcagaaatctttcctcctccaccatctgtgtgagaaaagggtttccagcactggctcttgattgggcaccggcctcatgtgccgagttgggaggtgcaaaggggacccctgcctccaggggggctgtgggtcgcactgtggatagtgtgaggcattagtgcatctggactcagtgattcacacactgcctccgtttaactgagctctcccatgagccagcttatgacatcggcaaagcgggatgtttaggtaaggccagagtgggtcaggtattgagattgttgaccaaatagggttgactattttgtactagagaatcctgcaacctagcaggtaacattatgtgagtggttggaggatttgcaggaagccagcatcatttcttcctccttccctgtgttgttttattccttcctagtctgtggagtccccagagaaccctttgaagaaaaacagaggataattggaggatccgatgcagatattaaaaacttcccctggcaagtcttctttgacaacccatgggctggtggagcgctcattaatgagtactgggtgctgacggctgctcatgttgtggagggaaacagggagccaacaatgtatgttgggtccacctcagtgcagacctcacggctggcaaaatccaagatgctcactcctgagcatgtgtttattcatccgggatggaagctgctggaagtcccagaaggacgaaccaattttgataatgacattgcactggtgcggctgaaagacccagtgaaaatgggacccaccgtctctcccatctgcctaccaggcacctcttccgactacaacctcatggatggggacctgggactgatctcaggctggggccgaacagagaagagagatcgtgctgttcgcctcaaggcggcaaggttacctgtagctcctttaagaaaatgcaaagaagtgaaagtggagaaacccacagcagatgcagaggcctatgttttcactcctaacatgatctgtgctggaggagagaagggcatggatagctgtaaaggggacagtggtggggcctttgctgtacaggatcccaatgacaagaccaaattctacgcagctggcctggtgtcctgggggccccagtgtgggacctatgggctctacacacgggtaaagaactatgttgactggataatgaagactatgcaggaaaatagcaccccccgtgaggactaatccagatacatcccaccagcctctccaagggtggtgaccaatgcattaccttctgttccttatgatattctcattatttcatcatgactgaaagaagacacgagcgaatgatttaaatagaacttgattgttgagacgccttgctagaggtagagtttgatcatagaattgtgctggtcatacatttgtggtctgactccttggggtcctttccccggagtacctattgtagataacactatgggtggggcactcctttcttgcactattccacagggataccttaattctttgtttcctctttacctgttcaaaattccatttacttgatcattctcagtatccactgtctatgtacaataaaggatgtttataagcaaattttgtgtgacttacctcattccacaccaaaccctcagaattatagaaggggaatgggatgagaaggctgttatgtcactgaaattgggcatccagcaactaatatttaatttaattgtcacgaaaacagggaattcagcttttcttctctcttccaaatgagatttactgaatattgtgggttagtatgaagatcgccagtgtaaggcatcacattctgcttttgaaactcattaatatttacctggccaaaaaaaaaaaaaaaaaaaaaagaagaaaagaaaaataagaaaaaaaagaagctcattaaatgtcatgtggtgcgtggctcacacctgtgatcccaacactttgggaggcaggggtgggaggattgcttgagcccagggattcaagaccagtgtgagcaacatagggagaccctgtctctacaaaaataaaaaataaaaattagctaggcatgatggtgcgtgccttagtcccagctactcaggaggctgagttgggaggatcgcttgagcccaggaggtcaaggttgcagtgatcatgccactgtactccagcctgggcaaccagagtgagacattatctggaacaaagcaaaataaaaaaaccccacctcattcagaaatccatgtacaatagtttgagttggctgtttaagatcttctttaagtagaaattgtttcaatatgtgaacggaaagttaattttcctctaatactcattgtatcatgcaatattatgacaacaaaaaagaaaaactaaagaaattgagcatgctcttgtctgctttcctggtggttttaatcaatttgtgacaatgttttcattagactgaactctgtaccaagatgacatagcagaaaatctcggtaaggatggaccccaaaactctcccttctattttctaggggaaggaaaagaaaagattcctcttccaaaagaatgattagtgatgagaaatgactacagaatagagacttagcattttaaaaactgaggacaggacaactatcttaggacagcggttgccctaacagggcgtcttaggaaagcggaggtctgagaggaagagctgagggggaatctgacctatttgatgtgacacgtggctttcaggagggcagtttttactagaagccaaaaaaggttggtttgggcccatcaagaatggactttgatattccatagaccaagagggctaaattcaacagttgaccttagaccgcagggtaaacgtgatgaggtaaccagaggaactctaattgaagggcctgaagaattgaagggaattacaacagggagtccctgggaggattatatggtcaaccaagcagcataaagtcactgtgtcactcctgaactgtatgcctcatagccacctcctcacccttcctgtcattgcaggagcaatggagttgacagtgtgccctgggtgagagtgtttccgtgagaggaggattcttctagagataaaaaggcattggaggaatattaagatttagaaacatggtctgtgaaagggatattgttcttctttttttatacttggggcaatagcaaaaaattaacctggaatctgacaagtaacagaaaaaggaagttcatccctctcggagaatcaccagtctatttgggttctgcccttgctgatgggctgaggtattggtgaagaatttccctctttgctgccaccttgtacggcatgacgggaatgggctttgcatcgttgactgtgctgcaaggtcatttctctgggtgaatggcagggagaagacctaaatgaatcatgatcagagacttcagagctgggaagagcttgtcatcaggtcctagaggggctagaaagtcattcattgtgtttaaagggtatccatcgtagtaccttgcaagttacttgggaacatatgtccgcttcatctgaaactcaggaaaagagttagctttttgaagaaggtgaattgtcacttttctttggtcagaagaaaatggactggtgggtcagcaactcatgccagggaggaaagacaatgtccggtggtcaagagggcttgaacctacttgaaactggaccagcccagaaggggctagaagggatcctgggactctaaagtttcctttacagtgactgctagaatcagaaacatattcagtggaaatgtgacttttttcctgcatattggttattattttaaaaattgaaaatatgatgtgaggcgtggtgactcacacctgtaatcccagcactttgggaggccagggaggatggatcacatgaggtcaggagtttgagagcagcctgaccaacacagtgaaaccttgtctctactaaaaatacaaaaattagccaggtgtggtggcaggtgcttgtaatcccagctactcgggaggctgaggcaggagaatcgcttgaacctggtattgcagtgagccgagatggcaccactgcattccagcctgggcagcagagtgagattccgtctcacacacacacacacacacacacacacacacacacacacacacacggacacaacacagctttatttaatcttgatcagatccacaaactctgccatggtttttaaaataatgatttaacaaaaccctttttcttttgacatattcacaagaagttgcaaagttagtacagagaggcgctatttcccctaatggctacatcttaggtaactacagtacaatatctaaaccaggaaactcatgttggtacaatgtgcaagggcagttttgtgttattttactacattggagactcatgtgagcacctctgcagtcaagatacgaaacaattccatcactaccaagatttccctcttgctacgttttgtactcacatccttttttattttctcttacaatcataaaaagacacattggaaagatccagcttctctcatttgtcctaagaggaaattgattttgggtatgtccacccttgaaccagagaaaagcagagactggacatattgagggagatgaagttgtggtaacaggaaccacaacgggggaaccccccccccccagagcaaaacctacagggaaagtctctgatggacctagtttcctgaatggaagcatctgttttaaaaaaaatctctcttcctctataagggactacaaagaacacagaagacctgcagctgccaggaaggagctcattctgattgtaaccattgtgttctgcctcatctccaaatgggctgtttgcattgtgtatctatctccctttaggtttaatgtggaaacaaatcatttcttttgtcttcattgcttaaggactgagtgtgaaatatttttggcataatatgctcaggtttttctgggcatctgcctattcatggataaaatgaaaatgtttcttgatctctcttagacagaaagcaagaagaacttaaggtttttaacagaaaaaataaaagaggatggctagaataaaaatccacagaaatagggccgggcgctatggctcatgcctataatcccagcactttgggaggccgaggcgggcggatcatgaggtcgggagattgagatcatcttggctaacacggtgaaaccccgtctctactaaaaatacaaaattagccgggcgtcatggcgggcacctgtagtcccagctattcagcaagctgaggcagaagaatcatttgaacctgggaggcagaggttgcagtgagcctagatcacgccaccgcactccagcctgcgtgacagagcgagcctctgtctcaaaaaaaaaaaaatcacagaaataaaaattcacagaataaaaatgcacggaagcagggatgaaagcaaaaaaagcacctgagcacctagttgggggagaagtcaggacagcagagaagaatcctggggccactgcaggtgagtgtgtcagatctgagtaggactgaagaagacctaaaagggagaatttggccttctcatagggccaagcagaggccggttgtgtggggcagggctgaccccaaaaggcttgacagagacccccgaggagaggttttggaaaacactgaacacctaggttggacctagatgaactttacctgctctgccacataattgtgatacaatttatgtagaatttttttccagcaatttacgaagttgtctcgagtttgccttaagtggccctaagcctttcaggtctcttttcccggtccttggtggcttgcctccgttttggtgtcctgtgttgtcctcactgtcatcatctatcctctgaaaatatgatttttttttcctgcatgcctgttattttccttccttccttccttcccttcccttcttccctccctccttctgttccttcctctctctctctctctctttcttttagacggggtcgcactctgttgcccacgctggagtacagtggcataatgacagcttactgtagccccaaactcctgggtttaaggagtcctcccacctcagcctcctgagacactgagactacagtcatgcactaccacacctggctaatttttaatttttttgtagagacagggtctcgctatgttgcccaggctggtcttgaactcttggcctcaagcaatcttctctccatggtctcccaaagtgatgggattgtagggatgagccaccacatctggctcttctttggtttcaatatgctcacttgacgtaataaaaccctgcttcctgtgtgcctgaatggtacggctgctagtggctaggggaaaacacacaagctcacacaactgtctcaaaaaaggtgagaatgtctcacaaaagaacaactgtctcccttttaactgttggccatgaatctcaaatgaacccttcatgctcccaggcaatcaaaattccctaatccattctcaatcccactgtcccagatgactatttcatttcttctctcttctcacacccctgaaattctccatcctcattctcagctgatgaccttattttctacctcaccaagacacatgaaacctagcagagagcttctaccaccaccacatctactggaatactg

SEQ ID NO: 289 - DNA, 1995 bp, Homo sapiens
ctgtggcatctcctgtcacattgggaaatgaagaattccaggacatgggcttggagggcgccggtggagctatttcttctctgtgctgccctgggctgtctcagtttgcctggctccagaggtgaaaggccacattcctttgggtcaaatgcagtcaacaagagctttgctaagagcagacagatgcggagtgtggatgttaccctgatgcccattgattgtgagctgtctagttggtcctcttggaccacatgtgacccctgtcagaagaaaaggtacaggtatgcctacttgctccagccctctcagttccatggggaaccgtgcaacttctctgacaaggaagtcgaagactgtgttaccaacagaccatgcggaagtcaagtgcgatgtgaaggctttgtgtgtgcacagacaggaaggtgtgtaaaccgcagacttctttgcaatggggacaatgactgtggagaccagtcagatgaagcaaactgtagaaggatttataaaaaatgtcagcatgaaatggaccaatactggggaattggcagtctggccagtgggataaatttgttcacaaacagttttgagggcccagttcttgatcacaggtattatgcaggtggatgctccccgcattacatcctgaacacgaggtttaggaagccctacaatgtggaaagctacacgccacagacccaaggcaaatacgaattcatattaaaagagtatgaatcatactcagattttgaacgcaatgtcacagagaaaatggcaagcaagtctggtttcagttttggttttaaaatacctggaatatttgaacttggcatcagtagtcaaagtgatcgaggcaaacactatattaggagaaccaaacgattctctcatactaaaagcgtatttctgcatgcacgctctgaccttgaagtagcacattacaagctgaaacccagaagcctcatgctccattacgagttccttcagagagttaagcggctgcccctggagtacagctacggggaatacagagatctcttccgtgattttgggacccactacatcacagaggctgtgcttgggggcatttatgaatacaccctcgttatgaacaaagaggccatggagagaggagattatactcttaacaacgtccatgcctgtgccaaaaatgattttaaaattggtggtgccattgaagaggtctacgtcagtctgggtgtgtctgtaggcaaatgcagaggtattctgaatgaaataaaagacagaaacaagagggacaccatggtggaggacttggtggtcctggtacgaggaggggcaagtgagcacatcaccaccctggcataccaggagctgccgacggcggacctgatgcaggagtggggagacgctgtgcagtacaacccagccatcatcaaagttaaggtggagcctctgtatgaactagtgacagccacagattttgcctattccagcacagtgaggcagaacatgaagcaggcactggaggagttccagaaggaagttagttcctgccactgtgctccctgccaaggaaatggagtccctgtcctgaaaggatcacgctgtgactgcatctgtcctgttggatcccaaggcctagcctgtgaggtctcctatcggaagaatacccccattgatgggaagtggaattgctggtcaaattggtcttcatgctctggaagacgtaagacaagacaaaggcagtgtaacaatccacctcctcaaaatgggggtagcccctgttcaggccctgcttcagaaacacttgactgctcctagcagatgatacagcagtgggctacatacaatgagagccctgagccctcaagaactcacgccagctcagccctacaccagtttccacctggagttcatgcaagggcaaaaggcagtgccatgcaagctgtttaaaataaagatgttaccttgtaaaatgcaagttgatttaaataaatactgagttaaaggctt

SEQ ID NO: 290 - DNA, 31737 bp, Homo sapiens
gaattcttaaatacctcacgctttaccacagtcagggttggtgttaggaaccatcccacagctgagtcttcaaggctgtgtaagaaggtggtgccctagctatggggaaaggtcagctgcagaaatggaaaatgaagtaggtcttgatagaatcagtccatcaacattttttaattaaattccccattaccatgagtaataacctatgttaaatttagtcttcatgaaacctattgttctatgacgactttcatttgcataatactttaaacttttcaaaatatttttccacactgtatctccatagattttccaaataatactgggagattgttagaggaggtattatattcattttatagataagaactgagtgaaataaataaggccatttgactgattagttctagtagagctgaaacaagtttctctgagtctcataaaactatatttttctaccataccaccttaccctctcctccttaaaaccccaaccaacacccacagcggttccctcacatcactacaaaatccgtaagtcttaacttcgacaccttaacttcaaagcaaaactaaccttaaaaaatgaaactccttaagtagctacttatcacacaaatatttgaattaaggaatataggagagtggtataaatcagtaattaatatttaggaagaggtttcaaaacaacatatattgttatatttgtaatattctttcataccattaatgttgcatgtttactcactacaaacctccagtattcttatatggagctgtggattctttgtgaaatagaggtaataggagtacactccctaatcatagcaacatgcttataaactacatctacccaattcattctggacaacctcaaaaagtcctatcaatagtcacatacagttagattcttctacatgtgaaagtcacaagcactcatggtaattaatttatactgttttcatttgaaggcctctcacatctatgttcttatgccaggagaattgagttgtatcacaaatgtttcagcctcttatttgtaggcatctgagagtctccagaagtgtttggggaaatcccccaacccatcttgcattcattgaaaaggcatacatccagccagctgtaagtgatatgcaaggaattattttttgtgatctaagcataacaccacttctgtgaagggagctttctcttcagttcacctggtaaattggaactgcccgtggttctagatgcaggtgtgaaagcaggcatctataagcactgccaaagaacatattctttttttatttcccaggtgatgactttccatccatgagaagtgttcatgtttcttggcagaaaaaattggcttattctggactagactggctgtctctgtagtagtggaaccaagtccaaagcttttgaaacatttcttcctttgttgtgctttagactgtggatcaacttcattttaactttccagatgggtccagccaactggccaatttgatgatctataaaacaataaccttcaaactaggatatgcataccatggggtgcacaaaaactttccaagggcagacaaataagtcttaaggtaatagtttcctcaactattaattatgtagctaagctaatagtaaatcctcaacttccatacgtacatgtttttcacaaaattaataagcatgacaattcagctgcattcaagctgtcaggcccattctcctttcttgcttttttaaacaatcacttacttcttactttttaagagcagagtatactcctcacccatctcacactcacattttactatagagaggaaaaaaaaaacaagacacaactccaaatgttagcactcaactggactctgacaccttgaagttttgtgatctctaattctttttatcaacactgaaagattacctaatcaacttttagataatggagcataaaaataatttttgatgaaagatcactaactatgggatctctttttggtatataactcagaaaaagggattaaaattgtgtgacattgttataataaaatttcttttattcttatctacttatttatgtgagtaaaacttctcagcacttacaactataaaaatgaaaagtaggactcaaattgatactgaacactgtctcttcctagcaccatgaatgaatgaatgaagtaatattcattcatggatgtgggaaccaacatattaatttaaaaagaagactcattcatttcattaagatagctttccaataaaattttacttacagtaatgatttttaaaaatttaagatacctatatatggcactattaataaagaatttttaatacttagaccctatggtcaaagagtatttaatatttttaaatttcaattaatatctttttggtacagaaaagtatgacaagacaatcaataaaaactttaaaaaataaactatattacattaggttaaaattctgtgagggaaatggaatagaaatgtggattcaagaataaaaaggtgcatagagtatgtaggaagtctgtgtgccttctgttcacttttgctgtgaacctaaagctgctctaaaaagtaaagcctattaaaaaaataaataaaaaggaataaaaataactaaaaaatttccaactgttagaaaaatatcaatgctgtgtgacccagcatcactacagcatttatatttattgattttatctttaaagtggtaaaataattatatgttaaagtacaaataatgacaacattattaggaattatattctttgcatctacttaatcttaagatgaaaaatattagatgtcacgctaaaaatgtgcaggaaagtataatttatcaaaattcctttatagcggagacaaacagagtatctgaagaccattaccctcataacatgccatttccgtctctgagctcttacccacacatttctcctgcactagccccatcccaatttacccacccctcaaaacccatatcaaatctttcttctaaaactcttttaatgaccctcccatggtgatttcctcctccagaagactcaatgtgtaaagcactcacatgtacccctcatttggcacaagtacaatcctccctttctacccatcagggatcggttccaggacctcccacatgtacaaaactttcaggatgctcaagtccctgatataaaatgacatagtattcgcacatacctatgtacatcctcctgtactctttaaatcatctctgggttatttataacacctgatacagtgtaaatgccatataaattgttgctatactacaagagaaaaaaagtttgtacgtgcttatcatgtacatttttttccaaatgtttttaatccatgattggttgaatccacaggcacagagcccacagatatggagggctgattgtgtattcttccttggcctagtttttgaaattggtgattttatgttctactccttaatttgaacacaatttgcatggaagcagagagtgaatataaactgtcttaatattcccccctgctaattgcaaacactgtacaacacatagatatagtagtcacctaagagctaatcatcaatataaacaaaagttgatttcattgttcactgaaaataaagaggtacaatgtctctgttaaagtagccacaccagatatgtagttcactatcatataaagaaaatgtagctgagatcttgtttaagaaacaacccaggtcatttgcttccagtattttatgtcttactggtggagagcttgtgtcaaaatcttagtgatacaaaaataagtgtttatttcttttttttttttttcccaaggcagaagaatttttcttagtacagaacaaaatgaaaagtctcccatgtctacttctttctacacagacagagcaaccatctgatttctcaatcttttccccacctttcccctttttctattccacaaaactgccattgccatcatggcccgttctcaatgagctgctgggcacacctcccagatggggtggcggccgggcagaggggctcctcacttcccagtaggggcggccgggcagaggcgcccctcacctcccggacggggtggctggccaggcggggggctgaccgccccacctccctcccggactgggcggctggccgggcagaggggctcctcacttcccagtaggggtggccaggcagaggcgcccctcacctcccagacggggcagctggccgggcggggggctgacccccccacctccctcccggacggggtggctgcctggcagagacgctcctcacttcccagatggggtgtcagccaggcggaggggctcctcacttctcagacggggcggctgccgggcggaggggctcctcacttctcagacggggcggttgccaggcagagggtctcctcacttctcagatggggcggccgggcagagacgctcctctcctcccagacggggttgcggccgggcagaggcgcttctcacatcccagacggggcggcagggctgaggcgctccccacatctcagatgatgggccgctgggcagagacgctcctcacttcctagatgggatggcggccgggaagaggcgctcctcacttcctaggtgggatggcggccgggcagagaggctcctcactttccagactgggcagccaggcagaggggctcctcacatcccagacgatgggcggccaggcagagacgctcctcacttcccagacggggtggcggccgggcagaggctgcaatctcggcactttggggggccaaggcaggcggctgggaggtggaggctgcagcgagccgagatcacgccactgcactccagcctgggcaccattgagcactgagttaacgagactctgtctgcaatcccggcaactcaggaggccaaggctggcggatcactcgcggttaggagctggagaccagcccggccaacacagcgaaaccccgtctccaccaaaaaaatacgaaaaccagtcaggcgtggcggtgcgcgcctgcaatcgcaggcactcggcaggctgaggcaggagaatcaggcagggaggctgcagtgagccaagatggcggcagtacagtccagctgccgctcggcatgagagggagaccgtggaaagagagggagaggggagaccatggaaaggggagagggagacggagagggagacggagagggagagggagagggagagggagagggagatataagtgtttatttctcacaaggctgggcttcactgggagcttcacctcaagctgcaacagctgggtggttctgcttttcactgggatcactgggatagccaggttgaaggggcagcagctacccattagaagcccttttcaaggcaatggcacaaatacacgaaagcaaaagcaatgaatgaggcctcttcattcccatgctttgaactggcccactgtcactctcaactacatgccattggcttaaagtaagtcacatggccaagcacaaagccactagggagggaagtatactttgccggtgatgaggtcatggcaagggtgtacatgcagagatgggtaaaggattgggacaaaaattttaatttatcatgaggaataaggtgtttaaaaaaataaatcaaatatataatgtttttttcttttttctcatattcaaattaataggtctaatttttgaccctatattagaactttaaggccatagcatttttcatgaaaggtattttggtgggacaggcagtgggaggtggtcaattttatctatatgtcagccttgaggaagatattcatgcatcagtttcttaacttgccttccattaaagttgaaccattttagattcactttggaacttcgtagattcaaagtttatgtaaaatgtgctatttatataaagatgttgtttttaactaacccactaccagtaggaaaccctttcaattatttctcttgcataagccatgggtttacagtaaactacccactctttgacaaattggtcttaaaaccaacatccagatttgtaatccagttcattggagttaggaatgtggcctagggcaatggaagagtttgtgtttttgtttttgtaccaaggtaagttatagatttgatcctcaaacctattggcctccctggcttggggccgtttattccagatacagcctagacagcaatgactgtgttcctccaatgaacagaggtatatttcacaaggaaataactgcttctagttcatatattgtttctaagcctacaagtaaaattaaacttttttaaaagctaaataaaatttatatttatgaatgaaagcttgccaaataaaaatattttgctatgggaaaaaatagaacttttgagaatgccttgccaggatgctaaaatttttgtgttcatcttggagagcataacgggaataatataagcctggagggaatgaggttcttgacaagcaatgagacagctggaggaaaaggcttaagtttaaagagaatggggtgagtgagagaaagccccaatgttgattcatagatgaaaaattacatgcacatgttatattggccccctgagatgctctgttctcaaataatttaaatagttggtattacagcatcagttattggttcactaagggaggttaggtaagagttacagcagtgaagttaaaactccaggaaccagatggtcccatgtgccttacttattgcatttctttcattgcactctaaacagtgccttagttgcctaaaagagttcataagcctctcctaaggtatgctttctgccagagacactgagccaaggtgaacaggctcttgcttctgttcctgattatagcacacacatattgggtgacggtgacatgaactgaagctgtctcactttttccagctacagagggctgccttgcattgtgttgtggtatttccacttctgatactactctgttcattctcaggatcaacattttagggatggatcccctaagcacaccttttgacaatgagttctacaatggactctgtaaccgggatcgggatggaaacactctgacatactaccgaagaccttggaacgtggcttctttgatctatgaagtaagtctcctcggaggaaaacacattgttcaacttttggctgaaaaattgcttaaataagtttagtaccaaacaatgtgaaaaactcagtagaataataatttcacatgaacacaagacttaaagaagaggcgatgtagtttggatctctttagaaacatacaattgtgtcttctcaatcctcagtaacatgcacctagtgataaagatgtggcaaatacctagactccataaaaagaattatctcaggatctaacataactaaaaattaaatcagtgctgatttaagtagtgataacactgcttacgtgctacttgagttttgctgttattgtttgctagcctcctgatgaaaactcatctttgcgttggttttccttcagcatccgcctatgaagagcttgcttgactaatgtgagtggctattttcactcaccttaaactcctctacctcttgaaaatgatttataaaaatgatttttactctacacaacactattccaaacttagctatctttcttaaagtcacctaattctctagaacaatgacagactgtagccctccaccattaaaaggattaatatttatcacctttagaaattctttctttgttccaagcaaaatataatgaagaataataataagcttgctctgacccaggagctacaagagtctgtttcttaaagtggtcccattggtaaagaagagccacaaggtctgccttattcagttattacagggctcttattgttatcagtcccaccagtttgaaaaatgtgtatgcttttaaataagcattactttctgaaaatatcataaatcagtctctacatattgcagccagaagcaatcatgttttctcatgaatgctaaagactgtcatatcttgaccatttgactggcatgttttttttcacatgtagtcatgtttcttatacctataagtcagaatatgtcagttgccaaaaaatctgaggaaatcttttgggctgttggttttccccaataatgccaggttaaacttctttaagcacagatttttgtgatggaaagatgacaattatttttaaaaagtattacatacattctcctttcttaaatagaaaataccaaacatggtcaccttggtcattgctgatgggagaagggctattgttgtgttgatttagtttgtttggagtttagtctgcattttacggttttcctgtcttcaccactgtgatcagctcttagcttctccagaggggtaataacttgtacgacatagaatagtgacggctaggggctgcccaggactgatcttgaagccacgtttggaaaggaagcactgctttcccttatccataaccctggaaacacatgtgtttcagcatttcagaatgtttggtattttagaaaggtgatgtggtgtgatataaatcacaatggagtttggagcagcatcacataatctaacacatcaatatttctgtagcaaaactaatctatgttcatatatggtgggaaaaatgaagactatagataccttttactagttcaggtgagattaatacccccaaaagagtttgatgtcaagcttattagaaagaagataggaattgtggacttgaatatttatttgatgccaactggggcagtgggagttgaataggggttggctaaggcctccacatcactccgttgctgctcccactgctgataatccccttattcaaatctgttatggtcttggaaaataagtagccaaactcattattattatacataaaagaacacaaacttacatgaggggaaatatctactttaactccttagagatgatttttttctttaattcctactacttaatgaaatatgtcatttactttctcatgtgtatcagtagtacctgaaggcaaattatacatattatacttctttatagcttattaccaataccaactccatataatcctcaccagtttttgttggatgaaataattttttaactcttgccttagttacttattggcaataatttattggctttcatttttgacagaattatactggtccatcataacatgggaatgcacctaaataatgacatcttattctcatccattcatactctctcatttagggtcttttgtctctaatgggctgtggttctagagccactctgcttaggttgaaatcccacctctgccccttagtgctgtaaaatctcaggcaaattacttatcatcattgtgcctcagtttctttatctataaaatagaaataataatgcctacctcatggagataaatgggtctaaatatgtgaaacactcagaaagtcactggcatatagcaagccctcagtaaatattagctattattcattttagagtataattagttaaagacttagccaaagctaggtacataattagtggtcacacagcaggtcaagacttactgaccactttataaattagcagtaatgaccaagaacaactgtagaagtaaaaaggggaggggggagtgatgattgcgtttataacttaggtccttttctacttacttttctttggttgtttcttcacttttgttgttgaataacaatttgtaagcctaaatcaggtttcaggtgttcattataattcttcttaaatctgagtctccatgaaaatgtaagatttgggagatgaacaaaaatttgcaaaatgcacacagattataagcatagttttcgccccaatcctgccaaaatcctgggtgacttcaatatcatgtggactgccaagtatttcttgttgcctcataacttcctataccatttcactacagccactctcatttctagccacctaacccttggctttgtctttaccagaactttgctgtctctgaaatttgaaaatccaacttttaaccctctcatcttatcacagttgtctaacctctcagctctcaccctcatttatgcccacaaacctcttcttggcctcatctagaccttcagtctttttggaatctttttttctcctggtatatcttgctcttcctactttaaattattttgttcatccaagctagatccattttgactacatttgccaatattagcaatgtccttgtttccattcctcctacaatccagaaaaactctgatttggcatgaaccttattgttttctgccctacttgtaaacttacactgctgaacactaaagagaatattatgctcacacaaaaacagctagcattataatttcaactgagtcctccacattgttcagtaggtccgtaacaccttctcaggctttcctcattctcgttcttcacatgagcaggctcaatctttcagcaacaccctcaagcctcttactcttactcaccattttgatcctgggttcagcagatgacattagctccaacttgacagagaatacccaagtcataggcaggagctttcacagttgtttcttcaaagttattctgtgtacttactttgctactcagtccctctttacatcctattctctcagtaggaagttattctttctcttccctagcctggatcccactccaagtacattgctagacattctgctaagcctccactcaacctttccctctttttccttccactctggccttcatatataaatctttttcaagggtctcatctataaagaaacaaatgaagaaacctctgccatctctatatacccatgttgtctacacttgctatctcaacatatgtgcattgcatttattccccactctctgttatcttgtgtctatgcatttttcaaccctcttcaagtctatctcaagcttattttgagctcccttttggagaatccttaaatagtattgaactctttccagagttcctacattgcttcactgatttctctctatatattcttcttgagtgatttccttttcctcttctcctatggcttcagttttcactctattctgattgcatgcaaatcctatatttccagcccacatctctctctgaactagatgcttgtatatccagttgtctgccattgtcacagagtcaacatacctacagctgataaccaatcttactcccaatttcctgcttcttgctcttgaattctctgtcttggtaagtggaaataatatcaacctagtcatcaaactcaaaacctgaaatccctccttaagacattctttacagactcatttccctcaaaacccacaatatccaatcaatcttcaagttctattattataatctcctttaaatctgtttcttattccccattcccactgccactgccttaagctcccatcacttctcatgtaggaatgactcaaaatagtgttcttagtttacagcctctagcttttctcaacttcaattcattccccacatttcagtgtaaaaataataaatctgatcattctccttgaagcttaaatttggtgagtgtctatctatagcctgcagtgtagtagtcaatctccttggcaaggagtacaaagtgatccctgatctgatttttgattgccactccaccctcagctttctcctctgaatcctccatcttctaaaatgcttctcctacaaataaatgcaatatgctttgattttttctctatttggtatatattttgctgtataatacgtgctttttggttgctatctcacccttttatttaccacagaatactgaaaaactatattgtatactatgctagataaatgcctattgaatgaataaaaaattcatgccagcatattaacactgtaagttaatatttctaatgatggcaaaaaacaaatatttaattggaattgccattaaagttgacagcaaaattgcaagcagaggcttaatacacattccaactattctttctactgacaacttaagcccatttagaaaatctagcagcagataaagcttattacatacctggttatttgtcctatgttgatgtttctcaagtggaaaatatgtagtctttccctatagaaactgctatcttgaaagggactctgttctacaaataaactcatgcattcagggttgaagtcataggcaggggttaaatcatgaaggcactcatgtgccataataaatacactgagcatagtcctgagcataatgagggagccactccggagagcaaaaccctgagagtttcattttagaactttgtgttttgtggaaataaattttaagggaacaagaccagaggtaatgagaacagaaggaggctattttatggtccaagaagcagatgacaaaaggctaatctgggtctgtaatagtagagatgaagaagaagagataaaatccagcatatttaagaattaagaaattattaataaattggagacagtatagcatatgatcaatcacaaggttctgaattaagattctctgggtttaaattttggtaacttcctccacttaccacctatgtgaatttaggcaacttagttacatttcctggatctcaatttccatgataaaatcgtatgataatagtatacacttcacagggtttcagaaagattaaatgtgttaataactgtgaagtgattagaatagtgcctatcacaaactaaattttctatagatggaccctataaaaatggaaagaaaaaaaaccccacacaaacaaccagtgaattataggccatcaaaagagatgtgggaagttggatgtgcaggaaatctaccaaagaaggagtgggttctaagaagataatgattcgaatgctggtaattttgagtttgagggtctatatgaaattagatggagttatcctacaacaaggagattatttgaatcaaaatggagagaatgatctaaattgtaaaaagagatctaggtgttaattaacatacacatgatcattgcatctttttttttttttttttttttgagatggagtctcgctctgttgcccaggctggagtgcagtggcgcaatctcagctcactgcaatcactgcctccagggtttaaacgattctcctgcctcagcctcctgagtagctgggatttgaggcgtgcgccaccgtgctcagctaatttttgtattttagtagagatgggatttcaccatgttggtcaggctggtctctaactcctgacatcatgatccgcctgcctcggcctcccaaagtgctaggattacaggcgtgagcaaccgcgcctggcgatcattgcattcttgagggtgcctgagattaccaaagaagtgtacaatgagggagaagagaagaacatagagactgaagtcctagagcacacaaacgtttaagatttaggcacagaaaaaatattctatagataatagagatggattgtacttgttatcctttactgtcatattaccccaaaacttaatggctaaagggttaagaatgtgacagtagcttggctagatggttctggcagaggggtgcctcaagaggttacaatgaatctgttgttcataggtttcttctctcaattagtgagagatggctttgataataataactaatatgtggtttatggttttattatccatttgtacaaataaaattttaatgacatcttcaacagttttctctacttactctctatttacaactgctctccaaacctccacaacttgaactctgaaatatttcttgatcgtatctatctcttccatttttagtgccataagcaatgtttatttcttttcaaggagtattatatgaacaaattcttaaacaggataacttcaactgacccttataatatgtctggcctcctagaacatgcaagccccttgatcttctctctctgaatctagcttctccaacatctgtttattcagtactcataaagaaacttgcttccatctttgtgtttttctgctttctgtaatcttgccccttggtctctcgtccaagacttttgcttttctctctatgatggttacaagtattggtctatttctgaatgcttaacattgagcctagacttcttttcgcatggatggatttttccatttcccaattcagctttcattcctatgctttctgggatgactccatcctcagagtttcaggctgtactcgccactaccattctggcatagtgagaaaagctaccttttcttgagccattcaacaacatcctaattgataccctgaccaacaatctgttatatctgaaagtggccctctacgctgctgagttgataattgccttatgccatttcctttctagtcatttcacatacaagtgcaggtgcctacaaattacaccccctctatcagaaagcatggtgccaccagtattgttcttttttctcaagattgctttggccattcgagattttctgtggttccatacaaaatttaggattgttctttttatttctgtggaaaatgacataaaattatgatagggattgcattgagtctgcagatcatattgggcagtgttgctattttaacaatattaattcttccaatccacgaatattggatatctttccattgatttgtatattttccatttctttcatcaatgttttatgaatttcatcatacagctctttcacctccttggttaaatttattcctaagtgttttattctttttaattctgtagtaaatggtatttttaaaagtttcttttttagatggtttgtagctagtgagtagaaatgcaacagacttttgcatgttgattttgtatcctgcaactttactgaatttgttagttctaacattttttgtcttgttttgttttttgggtggtgtctttagggttttttacataaaagaatatcatctgcagacaattttacttcttcctttctgagttaaatgccttttatctctttcttttgcataattgctctaagacttctagtactattttgaacagagatacaatgggcatccttgtcttgttcctgacgtctgataaaaagtttcagttttaaccactgagtataatggtcaatgtgggcttgttgtatatggcctttattatgtcgagatacattccttctatacctaatttgttgagagtttttctaatctttaaatgacgttgaattttattgactgctttttctacatctattgagatgatcatataatttttatccttcattccattaatgtggtgtatcacaattattgatttgcatatgttaaactatctttgcatcctagatataaatctcacttgatcattgtgtatgatcattttaatatatttctgaatttagtttgtttatattttattgaagatatatatacatatatgttcatcagggatattggcttgtaattttcttttcttgcagtgttcttgtctggctttgatatcagggtaatgctggtcttataaaatgaatttggaaatattccctcttcttcaattctttggaatattttaagaaagtctaggattagttcttctttaaatatctggtagacttcatcactgatgccttcagattctgggcttttctttcatgggagactttttgtagtactgattcaatctttttaatcattattggtctgcattttctatttcttcataattcagtcttgatagattgtatgtttctaggaatgtatccatctcttccaggttattcaatttctttgtgcataatttttcatagtaatatcttatgtttatttatatttctgtggtatcagttgtacagctgtccctcagtatctatgaggaattggtcccaggaccactcacaaatagctaaatccttagatgctcatataacatggtgtggtatttgcatataccctatgctcagcctccagtataatttaaatcatctctagattacttagaatacctaagtgatgtaagtgctatttatatagttgttatactgtaatgtttagaagataatgacaagggaaatagtttgtacatgttcagtacaaatgcaaccattgcaggcccaactacatttgtgatccaatgatggttgaatccacggatgcaaaacctgcagatatgaagagccaacagtaatgtctcctctttcatttctgattttatttgagttttctcatttcttcctgagttagcctagctaaaggtttgttcattttgtttcttttttaaaaaacaaactcttggttttgttggccttttctgttgtttttctactacctattttatttatttctgctctgatctttattattctcttacttcaattgactttagtttagtaagcttagtttgcccttcagtttttagttccttaagatgtaacaatagattatttgagaaattcttttttgatgttagcatttattactataaacttttctgttagaactgcttatgctgcattccataagttctggaatgttttcatttttatttattttaagatatttttaaacttttaatctcttcattgacttatttattgttcaggaacatgttaatttttccatatttgtgaatttcccaaaatttctcctgttattgatttctagcttcataccattgtgatcaaaagagatccttaatattattttaatattcttaaaatgtttaagacttgttttatggcctaatatacgatctgtccacgagaatgttccatgtgtgcttgataaaaacatgtattatgttactttggatggaatgttctgtgtatatttgttaggtccatttggactaaagagtagttcagttccaatgtttccttaataattttctctccagatgacctgcctattgttgaacgtggagtattaagaagtcccctactattttattgcagtttgtctctcctttcagatctattaacatttactttatacatttaggtgctctgatgttgggtgtctagaaatttaaatatcctctggcaaaattgaccccttcattattatatagtgattttctttgtcccttcttgcagtttttaacaagtcaaaattttatctggtatgtttagctatccctgctctattttggcacttaaaggtgaagtgagtctcataggcagcatatataatagttgggacctgctttttaatccatttagctactctgcatctcttgattgagtacatttaagataattatcggtaggtaaggacttaccactgccatttttttcattgttttctggttgttttgtatgttctttctggctatttctttctctcttgctatcttcctttgtgattagataattttctgtactgatatgctttaattctttgcttttatgttttctgtgtctattataggtgtttgctttgtggttttcatgagttaccatgcagcttacataaaatatctatagttataataggctattttaaactgttagcaacataaattcaatcacatttttaaaacttctacacttttcctccccacattttgtttttgatgtcacaattaacatctttttatattgtgtattccttaactattatagctattattatatctaatagtgtggtcttttaattttcatactacagatatacttgatttgtacatcatcaatatggtgtgagagtattctgaatttgactatgtacttaattttaccagtgaattttataatttcataaattttttatgttatgaattatcattcttttctttcaacttgaagaactccctttagcatttcttataggaaggtctagaggtaatgaacttccacagcttttgtgtctctgagaaattttttattccttcatcatttatgaaggtcagaattgccaagtatactattcttgattggcagtttatttttctttcaatactcttgaatatatcatctcactctctcctggattcaaggcttttgctgaaacatctgctagtaatcttatgtgagctccctcatatgtgacgagttgttcttctcttgttttcaaaattctccttattgtatgacttttgagtttgattataatatgtctaagtgaagatctcttcatatatagtctatttggggttctttgggattcatggacctgggtgctccttttttttctccacattggggaaacttgctgtcattatttctttaaataagttttctacacttttgtgtttctctcttccttctggggcaccataatacatatactggttcacttgatggtgccccatagttcccacaggacttcttcactatttcttttttattttttgtttttctgattggtaatttcaaatgaactgtctttgagctcatgattctttcttctgtgtgatagaatctgctattgaatctcactatgaaatttttcagctctgttctttaactccctaattatgttctttaactccctaaatttggttgtttgtgtttttttatgctttctttctctctattgaacttctaattttgttcatgtatttttttcctgatttcatctagtcttctgtctgtattctcatgtagctcactgagcttctttaagctgattattttgaattcgttatcaggcagtttgtaaatttccacttctttagggtcagttaccagtgctttattttgttcctttggtgatgccatgtttccctgattatgtgtgatctttgtgaccatgcatatctatgcctttgaagaagtaagcacttattccattccttacagactaactgcagcagggataacccttcattaatcagtgtgtccagagattctgggcaagtcatctggcatggtccacaagcaggcttgatgctggagtccttgggtagacgtgattggttccttggttcactggggaaggcctggagcttgggtctgctggaatgagcctggtgcctgtatccatagaggtcaacctagcactggagtctacagaagtgggcctggatcctgggtccagtgggtccactggatcttgaggctgtaaggaccatcctggaggctgaactcatgaaggctggcctggagcctggggccaatagggctggctttgcactgggatggccctagaggctggatccctggtctcgcgcctgattttgggatttgcagtggccattctggcactgggtgaaactggagcctgagtctgtagtgaccagcctttgagactgagtcccaggtgctggcctggtgcttgaggtcatggaagctggcctgaagctgaggtgtacgggtgctgacctggcattgggttatagctggagtcttagtctgcaagtaaaatcctgagtctagggctacagagaccagcctcattctgggcctgtctaaagcctgagttgaggctggaaactttgtctgtgaaactggcctcgggcctgaggccatggaggctggcctggcactggttaagcctggaccctatatctatagggtgctgggatgtaactagagtcaaaggctgaagttttatttaataagtaattataaaagaagtggttttcattttattttgttttaaaagaggagccagaaaagcttgtagcaaaaatatttgttagtctgttatatcaggaggggctttcctaaagaagtgatgtttcaggtaagacttgaaataggagtgggaattaatcaacctgaggcctatgttttgtgtgtatgtgtgaaagggagtgtgtgtgatgtctgtgctatgggagggttggggggaaagagtaagagaacattctagaaagaaaaagcagcataaaagggacttatggtaagaacagcatgggttgtggaacagctggatggctgacacacagttagggagagattgactagaaataaatctagtttagactatattaaagtcattagaaatacattagaaagatctaagtagggaagtggcaatggttagtttgcttttccctgttatgctaggcagtttcttcaacatgtcttgttttaaagataactatatacatttcagtcttttcatgagacagtaataactttaggtttctcatgcagaacaaccactcaatactaaatccagtccatgacactgtctgaagatacaggtgtccccttcccagacaagagttatacctaattcagaagatttctgaaaagggaactgaaccacttatataacaagtctctcactgacaacaacctgacaatagccaagttggcaaaaaaaaaaaaagttctaattgaaattttagtgttgaaggaatatacctcaaaatagtaagagctatatatgaaaaacccacagccaatatcaccctgaatgggcaaaagttggaagcattctccttgaaaaccagcacaagacaaggatgctctctctgatgactcctattcaacatagtattggaaattctggccagtgcaatcaggcaggggaaagaaataaagggtattcaaatacgaagagagaaagtcaaattatctttgtttgcagatgaccagatgacatgatcctatatttagaaaaccccgttgtctcagcccagaggcttcttaagcttataagctacttcagcaaagtctcaggatgcaaaattaatgggcaaaaattgctaccattcctatataccaacaacaggcaagcagagaaccaaatcataaattaactcccattcacgattgctaaaaaaaaaacccataaaatacctaggaatacagctaacaaagcaagtgaaggacctcttcaagaactacaaactactgctcaaggaaatcagagaggacataagcaaatggaaaaacatttcatgctcacagacaggaagaatcaatattgtgaaaatggccatactgcccaaagtaatttatagattcaatgctattaccattaaactaccactgacattgttcatggaattagaaaaaaaaaaaccattttaaaattcatgtggaaacaaaaaagagcctatatagccaagataattctaagcaaaaagaacagagctggaggtgtcacactgcctgacttcgaactatagtacaaggctacggtaatcaaaatagcatggtactggtgcaaaaacagacacatagaccaatggaacacaatagagaactcagaaataagactgcacacctacaaccatctaatcttcaacaactctgaccaaaacaagcaatgggaaaaggattccctatttaataaatagtgctgggagaactggctagccatatgcagacaattgaaactggaccccttcgttacatgttatacaaaaattaactcaagatggactaaagacttatatgtaaaaccaaaagctatagaaatcctagaagaaaatctgggcaataccattcaggacacaggcatgggcaaagatttcataaaatgccaaagcaattgcaacaaaaacaaaaattgacaaacgggatccagttaaactaaagagcttctgcacggcaaaagaaactaacatcagagtgaacaggcaacctatataataggtgaaaatttttgcaatctatccatctgacaaagatccaatatccagagtctatgaggaacttaaacaaatttacaggaaaaaaacaaacgaccccattaaaaagtgggcaaaggatatgaacagacacttctcaaaagaagacattcatgtggccaacaaacatatgaaaaaaagcttaacatcactgatcattagagaaatgcaaatcaaaaccacaatgagataccatctcaaaccagtcagaatgacaattattaaaaagtcaaaaacaacagatgttggcaaggttatagaggaaaaggaacgcttttacagtgttggtgggtgtgtaaattggttcaactattgtggaagacagtgtgccaattcttcaaagatctagaagcagaaataccatttgatccagcaatcccaatactgagtatatatccaaaagaatagaaatcattctattataaagatacatgcatgcatatgttcattgcagcactatccacaatagcaaagacttggaatcaacccaaacgcccatcaatgatagagtggataaagaaaatgtggtacatatacaccatggaatactatgcagccataaaaaggaacaagatcacgtcctttgcagggacttggatggagctggaagccattatcatcagcacattaacataggaacagaaaaccaaacacctcatgttctcacttgtaagtgggagctgaatgatcagaacacatggacacgttagggaaaaaacactcactggggcctgttgggggtaggggtgacagagcatcaggaggaatagctaatggatgttgggcttaatacctgggtgatgggttgatctgtgcagcaaaccaccatagcacatgtttacctatgtagcaaacctgcacatcctgcacatgtaccccagaacttaaagtaagttgaaaaaaaagtttgctatactataagtccttcgtatgcattatctcactgaatttttataagaacctttgtgctaggtatgatgaatatccctgttttatagactaagaatcatactaagcacatagagattattgcataatcacttcaaagtgacagagtctgtatttgaaccccaggaatctgactccatcacttttgctcttaactcctttgttctactgcctttcaaagaattgtttgacttctctttggttctgttctgcttgtttttccttttgtttcgtatcttgtttttaacaacacttttttattctcttttagaccaaaggcgagaaaaatttcagaaccgaacattacgaagaacaaattgaagcatttaaaagtatcatccaagagaagacatcaaattttaatgcagctatatctctaaaatttacacccactgaaacaaataaagctgaacaatgttgtgaggaaacagcctcctcaatttctttacatggcaagggtagttttcggttttcatattccaaaaatgaaacttaccaactatttttgtcatattcttcaaagaaggtaagacaaaacagttaatataggaatatagaaaggttccaaactacccagactctttaagtattttgagcaaatagaaatcataaaaaggaaaagaaacatggatcaaattctcaaatatgtagctagcacgtcagaaagaatactaactggagaaaagtctgatagaatctttggcagtggtaaatgaataatatgtttggtggtagtgagcagaaaatgcgtattaagaatttagagcattttttgactgagattgtggtaatataccattcaatttatatgatcatcagaattttaatgaagaattatactgaagaattctggtaattcattgcaatgccttacctagaatgatcactgtttattaactacaaactgtgtctctaaagaaatgatgctatgaaattatacacatgcacataaaattggtctgattattttgtaatcatacgtttgagactttgaaaatgtgatttttaaaatatttgaaccagattttgaagtttgttctaccactcttggaataaatataaaatatactctctgtaatcagcatgacgccagtaaaatgctcattcttccttttctgataccacagtcacttatttagacaagcttctcccacattaacaataataattcactcttagtacttatatgatgcctaactatgtaattgttttgtatgggtctgtacattacctctctatttacatgcatacccactcaagtgtacaggtggaaaattctttaaatcattcaacaaatatttaattgtgacctatctggcctaggtacttagaatatatttgtgaaccaagctgatgaaaatttgtgtcctcatggagttgaaaactccacagaaagagacagccaaaaataatacatataatagcaaaaaagaagtaatatggtatttagaaagtattaagttctgtgggatacaaggaaaattagagtaacatgaaggaaagcagggatgcctgtaggtggcatgattaaaaaggaagctcaggcttagcttcatggagatgagaagtaaccaaagctttggaggagaggagatagccaaagagtaagatttcagattatttatctgacggaaggaactgttagagaagtctctaatgtaggaaaaacctggtgtgataaaagttagtcaaattgaatcagaaggataaaaagttagaaaagttaccttgaatcagatcatgaagaacttaaaagtccactcagtgtggctttttttctgagtgacatgggaggtcacttgagggtttttaattttaatttaatttaatttaatttaatttatttattttgagatagatttttgctcttgttgcccaggctgcagtacaatggtgtgatcttggcccaccacaacttccgcctcccaggtacaagcaattctcctgcctcagcctcccgagtagctgggattacaggcatgcaccaccacgcctggctaattttgtatttttagtagaaatggggtttctccatgtttgtcaggctggtctcgaactaccaacctcaggtgatccacccgtctcggcctcccaaagtgctgggattacaggtgtgagccaccgcgcccagcctacttgagggtttttaatagaagattgacattctctattatattttaaatgattactcaaggtattttgtcaagaagagatcataggtgctaagagccaaagcaaggagtcttgctaaaaattactgaaggaatccaggtgagacatgatggtagttcagataggacaattatagagtcaaacataagtccaaggtttttggcctgagcaactagaaaaatggagttgctgatggagaaagcttcagatagagcagatttggagagggagaccagtaattaaattttagttaggttaagtttgaggtgtttattagacatccaattgacaatgccaagtaggagttggtgttttgaggctggagtttgggaaaaagacctggaattgagctatacattgacttgttgacttcgtcatggggtcactaacagagttagtgtacatagaaaatagaatacaatcaaataccaaacttcctgaatttcaatagaaaacaagtaaaagaaaccaaaaagtgcccaagaactttgctacttagagtgtggtctatggaacagcagcatcagcatcgctgggaggctagaatcttagactgtgctccagaattgcattttacctgactcagtgttgcattttaacaagattctctaggtggtttgttcacattttatagtttgagaagcactggcctagaagacaagaaaataatctctattaagaagaagagagtgatgaactgtgtcaattgtgctaacatgtcaaagaagatgagggctaagaagatgagggctaagaagtgatcataggctttaggattatgaaagtcattggagaccttgataagagacattttgttggagtagtgaggtcagaagcatgaataatttagatttaagaaaaacagggaaggggagaattcaaaatatacagtatagaaaactgaataaattttgcttctagtgagggcaaagaaatgggtagtggctggtcaggcaagcgaggccaagggaaactttttgttgctttaagatagaagaaacaactgcatatttggatgataatgagctaagagctacctttgaagtaaattgacccaaagaacatcacatgtctttcttaccccaaatcccaagatatacctcccagttttagcaaaactgaaaagaaatccaaatatgctttgaataaggcatatttgagaattcttgtgcaagtcaggagatgaagagctcatatgacctataacatacaggctaagatttttattaaagactggatcacccactgtcacctaaagttaaatcatgatgacaacaatgtgctttaagaagacagacagtttggtatgatattcatatactgcaagatatacctttaaaaagaaataaaatattttaaactcccacataatcatcatatgttaaccacagctgttaggagaccctcaaaagatccatttgcaaaattgtgggtgtcaattgtagtttagttttcatcaggacaagctatggcattgaatcacacagttcactgccctagttttctccgggaaaggtaagccatcagccctggccctggaaacatttaactgttgagttgcttaggctgacttgagttccacgtctcaaaatattgtctgtcctgtctctgtcattaaaaattgagagggtggactgaaagggacaaggagacctgagatctaggtttttagtaccaatgctgtcaagtattattcatatgttttgggacaaataacttgatatctttaaattagttttctcatctgcataatagcaagattgggctttattgataatgtctccatttccttccactgttgtttttaaaacaacttagtgaggtataatttcataaaataaaatgcaaagattttaagtgtatagtttcatgagttttgataattatgtacattagagtagccatctcctttagcaagagaatattttaaatgttttaacatagaagacacagcagcatatttagatggaaattatttaagatctatgtttaaaatacattgagttaaagaacatcacaccaagaaaattccatcatgaagagacactcaggcttcttaccccaagaaaaattccttatgcccttttccgttccctaccacctaagaggtgaccactgaccagatttatctgaccacagcttagttttgcctagtctagaacttcatataaatggaattatataggatatactcctctatgtctgacttcttttactcagtataatatttttgagatttatttatgttgttacatgtatcagtagttttattttcctttttattgatgattagtattccattgtattaatatgctatggttgtttattgatttctctcttgatggacatttgagatgttttcaattttaagctattctgactaatgctgccatgaaattcttatacagatacttttgtgaacaaaatttttattaggtaaatatgtaggagtggaattgctggctggtcataagcaaatgtgtgcttaacactatgggaaagtgccacacagttcttcaaagtggctgtctaattttaccagtaatgtaggagagttttagtcactgcacattctcatcagtagttggtgttgatagtattttacatttagcccttctggtggattagagtggtatctcatggtcactgctaaaacatttagtgcctatggaagttctaaatttcataaattttcatttgaaatggtggataaaacacatgtttctcttcttcatctgctctacaacacaggaaaaaatgtttctgcatgtgaaaggagaaattcatctgggaagatttgtaatgagaaatcgcgatgttgtgctcacaacaacttttgtggatgatataaaagctttgccaactacctatgaaaagggagaatattttgcctttttggaaacctatggaactcactacagtagctctgggtctctaggaggactctatgaactaatatatgttttggataaagcttccatgaagcggaaaggtatgcctagaaatagagctctgacttcaaatactgttttgaccaaacattattttgttcaccaacctgtttcaatggttaaagtcttaagaatacaaagccctgtaacctgctcctttgagaggactctcttcctgccctttggcacctaaaaccctgttaaatagcaaattgacttccatctcaaacaagctgacttggtcatactctactcaacagtagcactgagagatggatccattgtattgcagcttcacatctattagaaggtggtacttttagtgaaatactaaacaaaaggtgaaagaaagtacagacataatttgtataacctacttcttaatcaatagactagttcaatttctatatcacagttatcttccagagtatacttcaatattggagggaaaatattgttctaaattttcttttagagggaaaagaagaagcagtgttatcatataaatctaacatcttaaagcaagggtggaaaattagttttacctcatgtgatgacacttctcattatatggtggtggttgaattgggctcatgttaagtaggtttctggtcatggggaaatcatggggaaaagggccatggttaattatcaatgtctgtcatgggtagaagataggcctactgatacatagttatcagcctggcctaaagggttcgtctaagtcttttaagaaaaaagtaaatgcaaagtgactatattaataagttgtaatcattcatgttgtgagtaattatggctagttataatattccttaaggaggtgatggatgccaggatgcttcctctctgcccttgtaactataggtgtgtctcttagggaggaaagcgttgctaaaaaccactttaatggcttttacggggtcagtgtcaaggtatcaggtgttaagtgaagggtggaatgtaactgtgacgtaaaagcctgatattctccccaaggtcagcaaatactttatggataacaaaacatgacatagccagaaccagctggtcttgatgcctcagtcttgttttgggcagagagaagctttcccgggggggagtggaatgtaatgttacttagcttacactttcacagggctatatccacagcatagtgaagttgctgtgagctccacctggaagctatattgatggagatatcacgtaagggaagggtacaagaggacacaggtcttgagtaacttgaaaatgagaagagaaaggcttatgagtggtgatcaaaacacaaagaaatcttcagactaggagttgttttgatgaaaaagctccataggaagagatctttaatcctgaataactcagaagctacttaccttctggccttaatagacaaggatcatcaggtcaattctagtgactttgaagaggaagtgctctttctcacttctccagtgccaatatctgagaaccaagccatgtcctccacctcaatttaagatgtctggacatgagtgtccactgctaaggcagagaatctgagccctttagggtcacccaggttatctttcaccctcatcttcagaagcagagtcctcacacttcttaaggataaggttagaaatctagaattacggatttctagtattgtcttcgatttttatcctctctcttcccttcccatgggaaatgccacctgataatttctaagttctcactaattgtgggtgcatgagaaatatttgataggtgaataaacgcctaaatgcccccagatgtctacccctgatactccttgtagaaccccatgattaacctcatttcatttttttctttcctttttcataaagcattttgactcccagaacaaataatcacaaattcgtgtgtatgtgtgtgtgtgtgtgtttgcatgtatgaaataaatgataaataacggcaaaaactgacattgtcagtgaactgtggtctgggatgtttacccttaaaatagaggaataattattttttttatgaattgcaaaaacagataataactgatagactttgaaaatattaggatttttctttctagtaactgtttgggcatctacacaccataatgagtcagcttccaagactgatatctaccaagtagcattcataggatgaaaacaaagtgaccacatacatcagccatctgtccaaagcgatgaaccagctacattaaggatgaactgagtcttccaaagaggatcaggagatgttgatgtatctcatccaaattatgaagttgatacagagaagtgcttagtagctagacaactctgggttcaaatccaaacttactagctgagtaatgagccattagtaggttattcaactgctctgcaattccatattttcatctgtacaatgaggacaatatggacttacttcataaggccagtgtgaggattaaattagttaaagcacacaaaatgcttagaaggatgccagacacatgataagcattcaatatatgttagacattgttgtcccttttctatgatattacagataaaagactttactataaccaccatagtctgacctatatccctttaaaccatgtggtagacttaatgtgtcctttgccattaagttgacaagcaaagtcaaaaggaggtcactataatctaatatgaggacaaagcaggacagacatgatggcacatttgaatttagtcatggtgtataggaacctaagtaaggatgttgcttgaaaatagcaaaattggaatttatttgtgatgttggtagacattatctaataattttcaaataaattcattaaacaggtgttgaactaaaagacataaagagatgccttgggtatcatctggatgtatctctggctttctctgaaatctctgttggagctgaatttaataaagatgattgtgtaaagaggggagagggtagagctggtaagtgtggcctcacttgttagattttataaagcctgagggtagatgtcaatgagcactgccctcttgcaatgagccctcttaattgtctgtcctctttgtgcttaaaaactatcttacatttaaagcggttttcaaaccactataaacaccgatagcgcatggacatgtattcaccagtatcactattgtgccagttgtacagtacacaactcaagggggtgtgattcacacggtagtcattttagacttgtatatttattatggcaatagtaaaaaagtatcttcataaaaagtttcctttcttcaccctaattttaacaaagcttccaaataagcaagcgacaatgttcgtgcatccattaacaaaggacaaggccaaaaccatttccccaactccaccttccatctaaattgaaatccctaattcatccttaactttaaattggtgcctaaccttttcaaaaatacaaatatgtttggtataaatattacttcctactgttaatctttagcagatttacaagcatgaattagtgctagagttctcaacttttcctctaatcagaaatacctgagaacatttttaaaatacaaatgcttaaagctcacctttaaaggaagagtcaactggtagtggggaggcaaaagtgaggaaaaacctgatatatttaaaagcataccaaccaataatatgtgtccatgattgaaaaaccaatgatgaagtagtggaaaaaagctgaatttgccattatacggtataatttctatatttggtccttaagctaactgtgtgatctctgactagtcactccacctctctaagtttccaatttctcttctataaaaatgaagaggggatgacaaaaattatcttgaaattcctttccagttttaaaaattcacagctgtaaaagacttacaaagttttgttaaaagtggcttcatctacagagagacactgagggaaacgatgggtaggatttgggagtggaaagaaatgttacttttcactttattcttttttgaactcttctttttgtaatattaaaacatatcaaagcaaatgtacacaatataattatgaaggtaagtttgcaaaagaaaatatatattacacccaaagtcatatttagttcccgtgagtacatgtttgtatgtgaggagctgtgaatttatcagtgtatctagaccatggg

SEQ ID NO: 291 - DNA, 2173 bp, Homo sapiens
ggcacagccttcctgtgtggttttaccgcccagagagcgtcatggacctggggaaaccaatgaaaagcgtgctggtggtggctctccttgtcattttccaggtatgcctgtgtcaagatgaggtcacggacgattacatcggagacaacaccacagtggactacactttgttcgagtctttgtgctccaagaaggacgtgcggaactttaaagcctggttcctccctatcatgtactccatcatttgtttcgtgggcctactgggcaatgggctggtcgtgttgacctatatctatttcaagaggctcaagaccatgaccgatacctacctgctcaacctggcggtggcagacatcctcttcctcctgacccttcccttctgggcctacagcgcggccaagtcctgggtcttcggtgtccacttttgcaagctcatctttgccatctacaagatgagcttcttcagtggcatgctcctacttctttgcatcagcattgaccgctacgtggccatcgtccaggctgtctcagctcaccgccaccgtgcccgcgtccttctcatcagcaagctgtcctgtgtgggcatctggatactagccacagtgctctccatcccagagctcctgtacagtgacctccagaggagcagcagtgagcaagcgatgcgatgctctctcatcacagagcatgtggaggcctttatcaccatccaggtggcccagatggtgatcggctttctggtccccctgctggccatgagcttctgttaccttgtcatcatccgcaccctgctccaggcacgcaactttgagcgcaacaaggccatcaaggtgatcatcgctgtggtcgtggtcttcatagtcttccagctgccctacaatggggtggtcctggcccagacggtggccaacttcaacatcaccagtagcacctgtgagctcagtaagcaactcaacatcgcctacgacgtcacctacagcctggcctgcgtccgctgctgcgtcaaccctttcttgtacgccttcatcggcgtcaagttccgcaacgatctcttcaagctcttcaaggacctgggctgcctcagccaggagcagctccggcagtggtcttcctgtcggcacatccggcgctcctccatgagtgtggaggccgagaccaccaccaccttctccccataggcgactcttctgcctggactagagggacctctcccagggtccctggggtggggatagggagcagatgcaatgactcaggacatccccccgccaaaagctgctcagggaaaagcagctctcccctcagagtgcaagcccctgctccagaagatagcttcaccccaatcccagctacctcaaccaatgccaaaaaaagacagggctgataagctaacaccagacagacaacactgggaaacagaggctattgtcccctaaaccaaaaactgaaagtgaaagtccagaaactgttcccacctgctggagtgaaggggccaaggagggtgagtgcaaggggcgtgggagtggcctgaagagtcctctgaatgaaccttctggcctcccacagactcaaatgctcagaccagctcttccgaaaaccaggccttatctccaagaccagagatagtggggagacttcttggcttggtgaggaaaagcggacatcagctggtcaaacaaactctctgaacccctccctccatcgttttcttcactgtcctccaagccagcgggaatggcagctgccacgccgccctaaaagcacactcatcccctcacttgccgcgtcgccctcccaggctctcaacaggggagagtgtggtgtttcctgcaggccaggccagctgcctccgcgtgatcaaagccacactctgggctccagagtggggatgacatgcactcagctcttggctccactgggatgggaggagaggacaagggaaatgtcaggggcggggagggtgacagtggccgcccaaggcccacgagcttgttctttgttctttgtcacagggactgaaaacctctcctcatgttctgctttcgattcgttaagagagcaacattttacccacacacagataaagttttcccttgaggaaacaacagctttaaaagaaaaagaaaaaaaaagtctttggtaaatggcaaaaaaaaaaaaaaaaaaaaaaaaa

SEQ ID NO: 292 - DNA, 1937 bp, Homo sapiens
agaggatcctgggcgccgccaggttctgtggacaatcacaatgggaatccaaggagggtctgtcctgttcgggctgctgctcgtcctggctgtcttctgccattcaggtcatagcctgcagtgctacaactgtcctaacccaactgctgactgcaaaacagccgtcaattgttcatctgattttgatgcgtgtctcattaccaaagctgggttacaagtgtataacaagtgttggaagtttgagcattgcaatttcaacgacgtcacaacccgcttgagggaaaatgagctaacgtactactgctgcaagaaggacctgtgtaactttaacgaacagcttgaaaatggtgggacatccttatcagagaaaacagttcttctgctggtgactccatttctggcagcagcctggagccttcatccctaagtcaacaccaggagagcttctcccaaactccccgttcctgcgtagtccgctttctcttgctgccacattctaaaggcttgatattttccaaatggatcctgttgggaaagaataaaattagcttgagcaacctggctaagatagaggggctctgggagactttgaagaccagtcctgtttgcagggaagccccacttgaaggaagaagtctaagagtgaagtaggtgtgacttgaactagattgcatgcttcctcctttgctcttgggaagaccagctttgcagtgacagcttgagtgggttctctgcagccctcagattatttttcctctggctccttggatgtagtcagttagcatcattagtacatctttggagggtggggcaggagtatatgagcatcctctctcacatggaacgctttcataaacttcagggatcccgtgttgccatggaggcatgccaaatgttccatatgtgggtgtcagtcagggacaacaagatccttaatgcagagctagaggacttctggcagggaagtggggaagtgttccagatagcagggcatgaaaacttagagaggtacaagtggctgaaaatcgagtttttcctctgtctttaaattttatatgggctttgttatcttccactggaaaagtgtaatagcatacatcaatggtgtgttaaagctatttccttgccttttttttattggaatggtaggatatcttggctttgccacacacagttacagagtgaacactctactacatgtgactggcagtattaagtgtgcttattttaaatgttactggtagaaaggcagttcaggtatgtgtgtatatagtatgaatgcagtggggacaccctttgtggttacagtttgagacttccaaaggtcatccttaataacaacagatctgcaggggtatgttttaccatctgcatccagcctcctgctaactcctagctgactcagcatagattgtataaaatacctttgtaacggctcttagcacactcacagatgtttgaggctttcagaagctcttctaaaaaatgatacacacctttcacaagggcaaactttttccttttccctgtgtattctagtgaatgaatctcaagattcagtagacctaatgacatttgtattttatgatcttggctgtatttaatggcataggctgacttttgcagatggaggaatttcttgattaatgttgaaaaaaaacccttgattatactctgttggacaaaccgagtgcaatgaatgatgcttttctgaaaatgaaatataacaagtgggtgaatgtggttatggccgaaaaggatatgcagtatgcttaatggtagcaactgaaagaagacatcctgagcagtgccagctttcttctgttgatgccgttccctgaacataggaaaatagaaacttgcttatcaaaacttaaaaaaaaaaaaaaaaaaaaaaaaaaaaaaaaaaaaaaaaaaaaaaaaaaaaaaaaaaaaaa

SEQ ID NO: 293 - DNA, 2265 bp, Homo sapiens
gctgccgaagtcagttccttgtggagccggagctgggcgcggattcgccgaggcaccgaggcactcagaggaggtgagagagcggcggcagacaacaggggaccccgggccggcggcccagagccgagccaagcgtgcccgcgtgtgtccctgcgtgtccgcgaggatgcgtgttcgcgggtgtgtgctgcgttcacaggtgtttctgcggcaggcgccatgtcagaaccggctggggatgtccgtcagaacccatgcggcagcaaggcctgccgccgcctcttcggcccagtggacagcgagcagctgagccgcgactgtgatgcgctaatggcgggctgcatccaggaggcccgtgagcgatggaacttcgactttgtcaccgagacaccactggagggtgacttcgcctgggagcgtgtgcggggccttggcctgcccaagctctaccttcccacggggccccggcgaggccgggatgagttgggaggaggcaggcggcctggcacctcacctgctctgctgcaggggacagcagaggaagaccatgtggacctgtcactgtcttgtacccttgtgcctcgctcaggggagcaggctgaagggtccccaggtggacctggagactctcagggtcgaaaacggcggcagaccagcatgacagatttctaccactccaaacgccggctgatcttctccaagaggaagccctaatccgcccacaggaagcctgcagtcctggaagcgcgagggcctcaaaggcccgctctacatcttctgccttagtctcagtttgtgtgtcttaattattatttgtgttttaatttaaacacctcctcatgtacataccctggccgccccctgccccccagcctctggcattagaattatttaaacaaaaactaggcggttgaatgagaggttcctaagagtgctgggcatttttattttatgaaatactatttaaagcctcctcatcccgtgttctccttttcctctctcccggaggttgggtgggccggcttcatgccagctacttcctcctccccacttgtccgctgggtggtaccctctggaggggtgtggctccttcccatcgctgtcacaggcggttatgaaattcaccccctttcctggacactcagacctgaattctttttcatttgagaagtaaacagatggcactttgaaggggcctcaccgagtgggggcatcatcaaaaactttggagtcccctcacctcctctaaggttgggcagggtgaccctgaagtgagcacagcctagggctgagctggggacctggtaccctcctggctcttgatacccccctctgtcttgtgaaggcagggggaaggtggggtcctggagcagaccaccccgcctgccctcatggcccctctgacctgcactggggagcccgtctcagtgttgagccttttccctctttggctcccctgtaccttttgaggagccccagctacccttcttctccagctgggctctgcaattcccctctgctgctgtccctcccccttgtcctttcccttcagtaccctctcagctccaggtggctctgaggtgcctgtcccacccccacccccagctcaatggactggaaggggaagggacacacaagaagaagggcaccctagttctacctcaggcagctcaagcagcgaccgccccctcctctagctgtgggggtgagggtcccatgtggtggcacaggcccccttgagtggggttatctctgtgttaggggtatatgatgggggagtagatctttctaggagggagacactggcccctcaaatcgtccagcgaccttcctcatccaccccatccctccccagttcattgcactttgattagcagcggaacaaggagtcagacattttaagatggtggcagtagaggctatggacagggcatgccacgtgggctcatatggggctgggagtagttgtctttcctggcactaacgttgagcccctggaggcactgaagtgcttagtgtacttggagtattggggtctgaccccaaacaccttccagctcctgtaacatactggcctggactgttttctctcggctccccatgtgtcctggttcccgtttctccacctagactgtaaacctctcgagggcagggaccacaccctgtactgttctgtgtctttcacagctcctcccacaatgctgaatatacagcaggtgctcaataaatgattcttagtgactttaaaaaaaaaaaaaaaaaaaa

SEQ ID NO: 294 - DNA, 1619 bp, Homo sapiens
gggtcagtgtcacctccaggatacagacagccccccttcagcccagcccagccaggtctcctacaccgccaccatgccattcggtaacacccacaacaagttcaagctgaattacaagcctgaggaggagtaccccgacctcagcaaacataacaaccacatggccaaggtactgacccttgaactctacaagaagctgcgggacaaggagactccatctggcttcactgtagacgatgtcatccagacaggagtggacaacccaggtcaccccttcatcatgaccgtgggctgcgtggctggtgatgaggagtcctacgaagttttcaaggaactctttgaccccatcatctcggatcgccacgggggctacaaacccactgacaagcacaagactgacctcaaccatgaaaacctcaagggtggagacgacctggaccccaactacgtgctcagcagccgcgtccgcactggccgcagcatcaagggctacacgttgcccccacactgctcccgtggcgagcgccgggcggtggagaagctctctgtggaagctctcaacagcctgacgggcgagttcaaagggaagtactaccctctgaagagcatgacggagaaggagcagcagcagctcatcgatgaccacttcctgttcgacaagcccgtgtccccgctgctgctggcctcaggcatggcccgcgactggcccgacgcccgtggcatctggcacaatgacaacaagagcctcctggtgtgggtgaacgaggaggatcacctccgggtcatctccatggagaaggggggcaacatgaaggaggttttccgccgcttctgcgtagggctgcagaagattgaggagatctttaagaaagctggccaccccttcatgtggaaccagcacctgggctacgtgctcacctgcccatccaacctgggcactgggctgcgtggaggcgtgcatgtgaagctggcgcacctgagcaagcaccccaagttcgaggagatcctcacccgcctgcgtctgcagaagaggggtacaggtggcgtggacacagctgccgtgggctcagtatttgacgtgtccaacgctgatcggctgggctcgtccgaagtagaacaggtgcagctggtggtggatggtgtgaagctcatggtggaaatggagaagaagttggagaaaggccagtccatcgacgacatgatccccgcccagaagtaggcgcctgcccacctgccaccgactgctggaacccagccagtgggagggcctggcccaccagagtcctgctccctcactcctcgccccgccccctgtcccagagtcccacctgggggctctctccacccttctcagagttccagtttcaaccagagttccaaccaatgggctccatcctctggattctggccaatgaaatatctccctggcagggtcctcttcttttcccagagctccaccccaaccaggagctctagttaatggagagctcccagcacactcggagcttgtgctttgtctccacgcaaagcgataaataaaagcattggtggccttaaaaaaaaaaaaaaaaaaaaaaaaaaaaaaaaacaaaaaaaaaaaaaaaaaaaaaaaaaaaaaa

SEQ ID NO: 295 - DNA, 2818 bp, Homo sapiens
ccacggtttgctccaggcgcgtcggaaccgcaggacttttcatccccgtggtcccacggtcctcccgcgccccggaggcctgccagccccgctcggacgctcgtttgcccctaacccgccgccatggcttcaccggacgaccctctgcgcgcagatcatatggtaaaggaaccagtggaagacacagaccctagcactttatcctttaatatgtcagacaaatatcccattcaagatacggaactccctaaagctgaagaatgtgatacaattactttgaactgcccacgaaattcagatatgaaaaatcagggagaagaaaatggctttccagatagcactggagatcctcttccagagatcagcaaggacaactcctgcaaagaaaactgtacttgttcctcctgcttgctccgggcccccaccataagtgacttgctcaatgatcaggacttactagacgtgatcaggataaagctggatccgtgtcacccaacggtgaaaaactggaggaattttgcaagcaaatgggggatgtcctatgacgaattgtgcttcctggagcagaggccacagagccccaccttggagttcttgctccggaacagtcagaggacggtgggccagctgatggagctctgcaggctctaccacagggccgacgtggagaaggttctgcgcaggtgggtggacgaggagtggcccaagcgggagcgtggagacccctccaggcacttctagagctcttcttcttccttcattggcctctccggatgttgaaacaaccacaggtcaagaaggaatgtgaatctgttgttttataagagtttaggacaaggacgtggaacagtggacactggttttccccaaagctggcagttttgtggaggggtagcttgtttcggtggtggatctctgtttatttttgcacatctgttataatttaatattcaaatctggaattaagaaaacatattttctagtatcctctaagggccaaagtcctacaatcggaatggattcatgccacgttgaagataaaattatcctctctctgaaatacggtaaagatttaaataggtcctgagactgttgatagccccagacatacccacagcattatatgtaacatctctcctgatcagtgccattcccacggtttcaaagaaaacagctacaaggaatgcttacctgagtgtctgcagcaccctccacttctctcctaggcaatgagacccagtggctagaaattcaccatgtctattctcaagatccatgccagggagctctttgactctcgtgggaatcccactgttgaggttgatctcttcacctcagaaggtctcttcagagctgctgtgcccagtggtgcttcaactggtatctatgaggtcctagagctccaggacaatgataagactcgctatatggggaagggtgtctcaaagcctgttgagcccatcaataaaactattgcacctgtcctggttagcaagaaactgaacgtcacagaacaagagaagattgacaaacttatgatagagatggatggaacagaaaataaatctaaatttggtgcaaatgccattctgggagtgtccctcgctgcctgcaaagctagtgctgttgagaagggggttcccctgtaccaccacatcgccgacttgtctggcaactccaaagtcatcttgccagtcccggtgttcaatgtcatcaatggcagttctcatgctgtcaccaagctggccatgcaggagttcatggtcctcccagtcggtgcagcaaacttcagggaagccatgcccattggagcggaggtttaccacagcctgaagaatgtcatcaaggagaaatatgggaaagatgccaccggtgtgggggatggaggcgcgtttgctcccaacatcctggagaataaagaaggcctggagctgctgaagactgcgattgggaaagctggctacactgataaggtgatcgtcagcatggacgtagaggcctccgagttcttcaggtctggaaagtatgacctggaattcaagtttctcgacgaccccaccaggtacatctcacctgactgtctggctgacctgtacaagtccttcatcaaaaactacccagtggtgtctactgaagatccctttgaccaggatgactggggagcttggcagaagttcacggccagtgcaggaatccaggtagtggaggatgatctcagagtgaccaacccaaagaggacagcctcggccgtgaatgagaagaagtgcaactgcctcctgctcaaagtgaaccagattcgctccgtgactgagtcccttcaggcgtgcaagctggcccaggcgaatggttggtgtgtcatggtgcctcatcattctggggagactgaaaataccttcatcactgacctggtggtggggctgtgacctgggcagctcaagactggtgccccttgctgatctgagcgcttggccaagtacaaccagctcctcagaattgaagaggagctgggcagcaaggctaagtttgctggcaggaacttcagaaaccccccagccaagtaagctgtgggcaggcaagcccttcagtcacctggtggctaattagacccctccccttgtgtcaactccggcagctcaagacccccgagcaacatttgtaggggccgctgctagttagctacccttgcccaccgccgtggagttcgcacctcttccttagaacttctacagaagcaggttgcagtgagccgagattgcgccactgcacaccagtctggagacagagtgagagtccgtcccagaaaaaaaaaaaaaaaaaa

SEQ ID NO: 296 - DNA, 2867 bp, Homo sapiens
tcccgtggagcagaggggcaaagtggcaggaacctcttaaagggcgagacgggcggcgaccgagaacgcggtcggcccggtccccgccgcacccagcccagagaagagtttagtgactgaggccgaaaattcacagcaccaacagaaggaagagggtgaggaagccataaactcaggccaacaagaacctcagcaggaggaatcttgtcaaacagcagctgaaggagataattggtgtgaacacaaggtgaaagcttctaatggagacactcctacacatgaagacttgaccaagaacaaggagcggacatcagaaagcagaggactttcacgactattctcctcgtttctcaaaaggcccaaatctcaggtgtccgaggaagaaggcaaagaagtagagtcagataaagaaaaaggtgaaggaggtcagaaagagatagaatttggaaccagtcttgatgaagagatcattttaaaggccccaattgcagctcctgaaccggaactcaaaacagacccatctttggatcttcattcattaagcagtgcagaaacacagcctcaccattacaattaagaattatttttagagtcttcttatttctgaagcatgtgaatattatctcgatcgttaaaagtcctgctcaggaagaactcagagaagatccagattctgaaattaaggaaggagaaggacttgaagagtgctccaaaatagaagtaaaagaagaaagccctcaatcaaaagcagaaacagaattaaaagcttcccaaaaaccaatcagaaaacacaggaacatgcactgcaaggtttctttgttggatgacacagtttatgaatgtgttgtggagaaacatgctaagggacaagatttgcttaaacgagtatgtgagcatctcaatcttttggaagaagactattttggtctagccatttgggataacgcaacctctaagacatggctggattccgccaaagaaataaaaaagcaggttcgtggtgtcccttggaattttacatttaatgtaaagttttatccacctgacccagcacagttaacagaagacataacaagatattatttatgtcttcagcttcggcaggacatagttgcaggacgtctgccctgttcctttgcaaccttagcattattaggttcttacaccatccagtctgaactgggagactacgacccagaactccatggcgtggattatgttagtgattttaaactggccccgaatcagaccaaggaacttgaagagaaggtcatggaactgcataagtcatacaggtccatgactccagctcaggctgacttggagtttcttgagaatgccaaaaagttgtctatgtatggagttgatcttcataaagcaaaggacttggaaggagtagatatcatcctaggtgtctgctctagtggccttctggtttacaaagataagctgagaattaaccgcttcccttggcccaaagtgctgaagatttcttataaacgtagtagctttttcatcaagattcggcctggagagcaagagcagtatgaaagtaccatcggattcaaacttcccagttaccgagcagctaagaaattatggaaagtctgtgtagaacatcacacgtttttcagattgacatctacagacaccattcccaaaagcaaatttcttgcgctaggatccaaatttcgatacagtggccggactcaagctcagaccaggcaagctagtgctctaattgacaggcctgccccacacttcgagcgtacagcaagtaaacgggcgtcccggagcctcgatggagcagcagctgtcgattcggcagaccgaagtcctcggcccacttctgcacctgccattactcagggtcaggttgcagaaggtggcgtcctagatgcctctgctaaaaaaacagtggtccctaaagcacagaaggaaacagtgaaggctgaagtgaaaaaggaagacgagccacctgagcaagctgagccagagcccacagaagcatggaagaaaaagagagaaagactagatggtgaaaacatttatatcagacatagcaatttaatgttggaggatttagacaagagtcaagaggagatcaaaaaacatcatgccagcatcagtgagctgaaaaagaacttcatggagtctgtaccagaaccacggcctagtgaatgggataaacgcttatccactcactcacccttccgaactcttaacatcaatgggcaaatccccacaggagaaggacctcccctggtgaagacacaaactgtcaccatctcagataatgccaatgctgtgaaaagtgaaatcccaaccaaagacgtccctattgtccacactgagaccaagaccatcacttatgaggctgcccagactgtaaaaggtgggatttcagagacacgtattgaaaagagaattgtgatcacaggagatgctgatattgaccatgatcaggtccttgtacaagccatcaaggaggcaaaggagcagcacccagacatgtcagtgaccaaggtggtcgtccaccaggagaccgagattgctgatgagtgagctcaggaactaacctaccccaactctgcccttctcccatccaagagaaaccacgaaaatgataaagaagctaacctgccatagtcagacttcagactttcaagattattctaaatcaccagaaaattaatttcagtttctattgggagtttataccaagagattcttctagatctcattgatccttttgaagagctttttctatattaggatatcagaattgttcaacttttcactctatagactgttttaagagttttggggggtttttaattgggtggtttgtaaccccttcagcctag

SEQ ID NO: 297 - DNA, 1689 bp, Homo sapiens
gttcgggggtggaatccttgggccgctgggcaagcggcgagacctggccagggccagcgagccgaggacagagggcgcgcggagggccgggccgcagccccggccgcttgcagaccccgccatggacccgttcctggtgctgctgcactcggtgtcgtccagcctgtcgagcagcgagctgaccgagctcaagttcctatgcctcgggcgcgtgggcaagcgcaagctggagcgcgtgcagagcggcctagacctcttctccatgctgctggagcagaacgacctggagcccgggcacaccgagctcctgcgcgagctgctcgcctccctgcggcgccacgacctgctgcggcgcgtcgacgacttcgaggcgggggcggcggccggggccgcgcctggggaagaagacctgtgtgcagcatttaacgtcatatgtgataatgtggggaaagattggagaaggctggctcgtcagctcaaagtctcagacaccaagatcgacagcatcgaggacagatacccccgcaacctgacagagcgtgtgcgggagtcactgagaatctggaagaacacagagaaggagaacgcaacagtggcccacctggtgggggctctcaggtcctgccagatgaacctggtggctgacctggtacaagaggttcagcaggcccgtgacctccagaacaggagtggggccatgtccccgatgtcatggaactcagacgcatctacctccgaagcgtcctgatgggccgctgctttgcgctggtggaccacaggcatctacacagcctggactttggttctctccaggaaggtagcccagcactgtgaagacccagcaggaagccaggctgagtgagccacagaccacctgcttctgaactcaagctgcgtttattaatgcctctcccgcaccaggccgggcttgggccctgcacagatatttccatttcttcctcactatgacactgagcaagatcttgtctccactaaatgagctcctgcgggagtagttggaaagttggaaccgtgtccagcacagaaggaatctgtgcagatgagcagtcacactgttactccacagcggaggagaccagctcagaggcccaggaatcggagcgaagcagagaggtggagaactgggatttgaacccccgccatccttcaccagagcccatgctcaaccactgtggcgttctgctgcccctgcagttggcagaaaggatgttttgtcccatttccttggaggccaccgggacagacctggacactagggtcaggcggggtgctgttgtggtggggagaggcatggctggggtgggggtggggagacctggttggccgtggtccagctcttggcccctgtgtgagttgagtctcctctctgagactgctaagtaggggcagtgatggttgccaggacgaattgagataatatctgtgaggtgctgatgagtgattgacacacagcactctctaaatcttccttgtgaggattatgggtcctgcaattctacagtttcttactgttttgtatcaaaatcactatctttctgataacagaattgccaaggcagcgggatctcgtatctttaaaaagcagtcctcttattcctaaggtaatcctattaaaacacagctttacaacttccatattacaaaaaaaaaaaaaaaaaaaaaaaaaaa

SEQ ID NO: 298 - DNA, 2481 bp, Homo sapiens
gttgtggttccgactataaacagtacgtgtttggcggctgggcctgggcctggtggtgtatctccgacactcagaggatttccctagagattatgacgttgcagccccgctgcgaggacgtagagacggccgagggggtagctttaactgtgacgggtgtcgcccaggtgaagatcatgacggagaaggaactcctggccgtggcttgtgagcagtttctgggtaagaatgtgcaggacatcaaaaacgtcgtcctgcagaccctggagggacatctgcgctccatcctcgggaccctgacagtggagcagatttatcaggaccgggaccagtttgccaagctggtgcgggaggtggcagcccctgatgttggccgcatgggcattgagatcctcagcttcaccatcaaggacgtgtatgacaaagtggactatctgagctccctgggcaagacgcagactgccgtggtgcagagagatgctgacattggcgtggccgaggctgaacgggacgcaggcatccgggaagctgagtgcaagaaggagatgctggatgtgaagttcatggcagacaccaagattgctgactctaagcgagccttcgagctgcaaaagtcagccttcagtgaggaggttaacatcaagacagctgaggcccagttggcctatgagctgcagggggcccgtgaacagcagaagatccggcaggaagagattgagattgaggttgtgcagcgcaagaaacagattgccgtggaggcacaggagatcctgcgtacggacaaggagctcatcgctacagtgcgccggcctgccgaggccgaggcccaccgcatccagcagattgccgagggtgaaaaggtgaagcaggtcctcttggcacaggcagaggctgagaagatccgcaaaatcggggaggcggaagcggcagtcatcgaggcgatgggcaaggcagaggctgagcggatgaagctcaaggcagaagcctaccagaaatacggggatgcagccaagatggccttggtgctagaggccctgccccagattgctgccaaaatcgctgccccacttaccaaggtcgatgagattgtggtcctcagtggagacaacagtaaggtcacatcagaagtgaaccgactgctggccgagctgcctgcctctgtgcatgccctcacaggcgtggacctgtctaagatacccctgatcaagaaggccactggtgtgcaggtgtgaggctcctgcaggcccactctcttcagcagccacccggccctccctccagcacccgttttaatcccacagaacaacgggaacgttactgactctggtgccttatctcgaagggaccagaagtgctgtgtgttcaggccatctctggctgtcttcctgtctctcctgtctgtccacctcctcctcttcctctcctttaccccactttcactgccactttcatcaggtttgtgtctcatctccctgcgtgtcttttcctttgtctgtctttttctttcccccatgcacatcatgtagattaagctgaagatgtttattacaatcactctctgtggggggtggccctgctgctcctcagaatcctggtgccttgaagttctctgtgcatctgtccatcctccctatggccctggccagagctcagcatgggcaggggttctgggtaggacggtcactgtcctctctcctggactggtcttcccagccctaaaccctgccccaggaagcccacagcctcacctgctgctgcccctctaggtctgggcagccatgacctgcagggcccagagacactgtccttcccctcatccacccaaggccccagccagcgctcataccctgtcctttctccctgaccccaagggcacagaggcaaggcctcctgtctacagcagcttcctcagtttcctactgccttaggaggcccctgcttgtgctcagggaaggcctcttcatgggcatgttcctgctggggcggtgcggtttggtcccaactctgctaagttttctgagatgagggtctagccctgttggggacagaaaagtgtgtagaccttcttcctgctagggctgcactgtcctgggtgttgggcccttctggtggacaaggctgtgccaaccctgtacagaatcgagtgctgtagcctggccagaccccagagcccttgtgccatctttcttcctggccagagtgatggggttccagccatggggaagcaacccaatcctctgtctccttgctccaatggaggcagaagagcccaggacccaagcgtcttggcaggggtgctgtgaatgtccagtggtcccagctccccaccctggccctgccccagcctgtgtagctcttcctgcatgtggatgctgcatgtctggtctggggcttggatgttgcactgccccactgcctgtcccttctggtaaaataaagaactcttaatgcccaaaaaaaaaaaaaaaaaaaaaaaaaaaa

SEQ ID NO: 299 - DNA, 31737 bp, Homo sapiens
gaattcctcaaagaatgatgaggacttgtcaaaaggagacagaagctaccttgaaggggatcccactagaaaaactggactaatttgaacatcaaaataaataatgactcaacaatgtgaaaacaaacaaccattaaaaatgggcaaaagatttgagcagatatttcatcaaagaagatatacagctctctcatgtgcaaataagcacatgaaaagattctcaacatctttgtcgttagggaaatacaaattaaaaccacaatgagatgccacttcacacctattagaaaggctaaaattaaattgacaataccaagtattggtgaggataaggcacaactgaaattattatgcattgctggttgaaatacaaaatagtgtagtcattttggaaaaatttgatagtttctttttttttttttttttttttttgagacggagtctcgctctgtcgcccaggctggagtgcagtggcgggatctcggctcactgcaagctccgcctcccgggttcacgccattctcctgcctcagcctcccaagtagctgggactacaggcgcctgccactacgcccggctaattttttgtatttttagtagagacggggtttcaccgttttagccgggatggtctcgatctcctgacctcgtgatccgcccgcctcggcctcccaaagtgctgggattacaggcgtgagccaccgcgcccggccgatagtttcttataaacatatacttaccaagtgacccagcaaatccattttcaggtatttaccaactaaatgtgaaactgtatattcacacacaaaaaacacatttacaaatgtttatataacacttcacgtttaattgtcaaaaactgcaaacaactcaactgtccctcagctggaaaatggataaacagataaatagactccatctctaaaaaaaaaaaaaattgtgttagctgggcatggtagcctgcacctgtagtcccagctccttgggagactgaggtagaaagatggcttaagcccaggagttcaaggctgcagtgagctatgagcatgccactgcactccagcctgggcaacagagcaagaccatgtgtccaaaaaaaaaaaaaaagaggccaggtacagtggctcatagccaggtgtgttggtgcactcccgtggtcccagctactcaggaagctgaggtgggaagattgcctaagcccaggggatcaaggctgtagtgagccatgatgttgccactgcactccagcctggatgacacagcaaaaccctgtctcaaaaaaaagaagtaaagaagtatataagaaatgtattgatactctatggttcctaaatgtggaatctgtgacagtgattatctcttcacatgacaggaatttgttcagttttaattaaatgttgctatagaaattgttggcaagagataaggcaaagcaatcacggcaataaaccctttcatcagcatctctagataatttgttatcctcacagtaacactactcctttgtagagctctacagaactattgaagagttaacagtgaggctgggggcaatgcctcatgcctataatcccagcacttcaggaggctgaggcaggcagatcacttgaggtcaggagttcaagaccagcctggccaacatggtgaaaccctgcctctaataaaaatacaaaaattagctgggtgtggtggcatgcacctgtaatcccagctgattgggaggctgaggcacaagaatcacttgaacctgggaggcaaaggttgcagtgagctgagattgtgccactgcactccagcctgggcgacagagtgagactctgtctcaaaaaataaaaataaaaaaagagttaacagtggaaaaagcatcaccgtggataaagaacaacatacaggaaatctctatgaaatggaaatgtgttaataatgaggatggagaattaattctaaaacaaaagttgcctagcttcaagcaaaggtgaaaaatctgtctgaagcagtaaaaggaaagtacaatgtccatagccaaagtttgtagctagttatggttggctaaggagatttaagtttgccagttttttcagtgtaaaaatgagtgatatggctgttgatataaaggtaatagaaacacatatattctgaaaagttaagagcaatgatagaaaaaaatgactatatggaatagcaaatctttaacatggataaaatggattgtcttggtgaaaatatgtcaaatagataatctattctggaagaataaaaacaattccagagtttctccctttgaaaggtaggttgtttattactttggagttaatgtagtgaaatactacgaaatataaaaaaaaccccagtagctaacaaaaactgtagctaggctgcatacccagacacacacatttttaacctataaaaaatggattactggccaggagccatagctcacatctgtaattccaacactttgggaagctaaagcagaaggatcgcttgaggccaggagttttgagaccagcccaggcaacatagcaaggcctcatctctacaaaaaatttaaaaattaattagatatggtggtgcatgcctgtaatctcagctacttgggaggctgaggtagttggattgcttaagctcaagggtttgaagctgcagtgagctgggatcatgttactgcactccagcctgggcaccagagtgagaccatgtctctaaaaaaagaaagtattatgggaagttaggaaatgtttatgtaaatatatatgtaataaaggtactaagtgcaatgaatcaaacaacatttgcaagcaaaatgttatagatcccaccaataaacctgcacaattcttaagagcaaactctccctaaaatactttactagtaagtaagagagagacccgagttctgtccatcctataaagagtatttctgtacctgatgtaatgtaatactgggggtgtgcaggtcaatagcagccagagaaggaattcgagattctgaaagaattttgctctctttctttgttagcctggaatttcgagctagatagaaatgaccataaacacagtgaaaatattagacattttgttagtttttagtttttcacattctctacgtgttcctcagtatgtacttattataacaggtatttacatacttaaatatgtaaagttagtatgaatttttatttttaaattctgtctaacatacattttaaataatctaaacagactacacaaagtaaaagcattatcaacacacctatgcctcccagtgctcttagttcagggagatgattatagtttagttcaggcaaacggacatctgtcctggagtattctcttcttttcttacttgcccaaaagaggtttttttcactagagacctaatatcatcaacatagtcaacaaaaaagaattagtttcaaggttagctaggctttccttcttctgtaactcctatgttcatatcctaaaatttgtgaaattgaaggtctataataaaaaatttgaaggacattaataatacaaaaaaaattcatccaattatttcaaatgtcttcctcattaaattcattaaaattgctaacaagtagataacttgagtgctatgagtttctccttcttcctttgccaattatcagtgtgtaagtcccagcaagtagtaaaaggttaaaagatgggcattgatgcgctggttcttcaggccagcaaggtcgggccttacacttcctaggcttttcagcaaatagttgctgttgtcttcataaattttgaacagtttatcttcacatgtatatcatatctccccctagcttatttttcactttcccaatataattttgttgttcatttttctatatatgtccttgtcttgctcctcagagttagaatataatactatcttcccaggaatacaatttattaagacacagaaagaattataacttcaattattttcctgatctttcttagtactattatttcacagttgataaagtcagaaaaaatagtgaggaatagcagcagcacttcaattctgcatccttatgaatttgacacttttccaatatttttcattcgagaatcacagaaagcctgtattcatatgtatgtataatgagctacatacacacaaacatatgtataatgacattaagttatggaggttccttgatgcctcaaacttaatattctgtgaattatgccattctggctaccagaaagtcttcaagagtcctgcagtgagcttttgagtttctttcttttggatgtttctgcttactcttttcatagaacaagcgctaaggctattggttcaagttggttataaaataaaatagttaaagaaaactatatgcaagtacaaaaaataaaatttaaaaatgagtttaaactaccagattaacatattcaaagagtgaaaataaaacatatataatatataatataatatatttattcacacatcagaatgggggcataaagcatgggagagaggtattgatctttaacatacaagttgaagaaagtctaggcttagctctgcttgcattaattttcgttaaggaaagactccactgggtcttcaccctcctaatcttcacctcctctcttgattacctcttccaaagaagaataaattacctcttccaaagaagaataaatcagatctaaaattatcagccagcattgattatgcaatacctgaaagcaggttgatatcagttctggcaaaatggtattgaaccagctattttgaaaagccttcctgattaaaataatcttccaaagcaaatcaggattttaaaacacaaatatccacaaagaaaccaaaaaagaaagtactattggcacagaaattataaactaagaataattaaaagaaaaacaaatacaatgtccaaatcatgagagagatgaaaaggctgtatttttcagctctgaagatagtgagagaaatagagagggaaatttgtctcacacacacacaaacacacacacacaaggaatattcctttgggaatacatccatacctccctttgttgtgaaaagcattcattcattcagtatggagtctttccttaatgaaaattaatgcaagcagagataagcctagactttcttcaacttgtaggttaaaggacaatacctctctcccatgttttatacccccattctaaggtgtgaataaatgtattattataaatatttattttgtgttttattttcactctttgaatatattaatctggtagtttgaactcatttttaaattttaggccagccctggtggctcacgcctgtaatcccagcattttgggaggccaaggtgggcagatcacctgaggtcaggagttcgaaaccagcctggccgacatggagaaaccccgcctctactaaaaatacaaaaattagctgggtgtggtggcaggtgcctgtaatcccagctactcgggaggttgaggcaggagaatcgctcaaatctgggaggcggaggttgcagtgagccgagatcatgccactgcactccagcctgggcgacagagcgagattctgactcgaaaaaaaaaaaaaattattttttctacttgcataggaaggaaaagtacagtgaagaaaacaaaagcacaaatctctgccttggaatcttacgttctagctgggggagacagacaatatataaataagagtatatagacgatgtcaggtaaatgcaatggaaaaaaaaataagcaaggagaaggcatcgaacataaagggaggcataatgagttacaagacttcacagtaaggtttcatgtgagctaagaagagaaaaagcaaatccattgggttatctgggggaagaatgttccaaagcaaaagaaatagcaagtgcaaaagcccaaaggtgggagtatgtctgactatgttccaggaataacaaggaaatcagtgtggtagaacagattgatggagaaagagtaggtggagatgggatagagggttggttggagtcaatcctgcaggcacttatagaccctataaggactttggcctttcctcagtgataagaagctaatggaggaagtttagcagaagaatgatgagggtttcacctaacttcaaaagagaaacattctggaggccatgctgagaataataatggtccttcctgtgctctgtctaaatacaatatgatactatgctttaatttgctgatcctctagatcatgaagtccttgaaaagaaagattgacttatttatttccagtgtctcacacataacgattgataaatatttattatataaataaatagaatcgtttctttcttcttttttttttttttttgagacagggtcttggtctgtcacccaggctgaggtgctggggcacaattacagccacagcttaccactgtagcctcaactttccaggctcaagcaacccacccatcttagcctcccaagtagctaggactacagtcatgtgccaccatacccagctaactttttaaaaaattttttgtagagacaggatcttgctatgttgctcaagcttgtctcaaactcctgggctcaaactatcctcccacctcggcctcccaaagtgctgggattatagatgtgtgctactgtccctggccaatagaatacagccaccaaaaatctggtgtgggtgagataagacaatttatcttttcatctactctaaaaaagaactgaccagcaatcatcaagttgagaaaatttactatgttactaaagaaaaaataaaacaagccaggcacagatggctcacacctgtaatcccagcactttgggaggccaaggcaggtggatcacgaggtcaggagttcaagaccagcctggccaagatggtgaaaccctgtctctactaaaaataaaaaattagctgggtgcggtggcaggcacctgtaatcccagctactcaggaggctgaggcaggagaatcacttgaacccaggaggtggaggttacagtgagccaagatctcaccactgcactgtagcctgggcaacagagcaagactccatgaaaaaaaaaagaaaagaaaaagaaagagaggaaggaaggaaggaaggaaagaaggaaggaaggaaggaaggaaggaaggaaggaaggaaggaaggaaggaaggaagaaaggaaggaaggagtttttagactcataaaacttaaactttcagaatttcacgtttatgactatgatgggttgggataatatatgcacaattaaggtttcactttatgtgtatccaaacaaaattctcaatacttcactatcatatttaattttaataaaagtctagagctgactggtgtttgctcttctactactgagaactgcttacttactaatgtggtcacattaatgttataaatgcctgatggggaatgtctgttcggtttaacaaatggaatagaacacttcttagttttctcatccactctgtaacgacaaaaaaaaatgtttttaagttagaaccagcaataattattttttcaagcacaaaactaaatgacacagcaccaactaacaagcagtttaaccagagtgtaatgtctattctcaaatatacaatgcacataaatctggtgaaacattctattctttaacactaccctcatgcctcccagcagcccccaactcctaccaaatacattaccctcctttcagcaaaattcccaaatggagcttccttatactactataggctcacagtcacaccatgcagcagcagccactcaaaaattatctcttttagtatgacaacctgctttcacattattagactatatagctgtagattctcttcaccttaagcaataaaaccctactttctcaggactttggtgaattgttttgatcaaatgctaataatcttcatcacacagccaaaaagtcttttgaaacagctacctgacaagaatgaatagcatccagaattctgagaataaaaacaatgtggatgaattgacaaacccttgcaatttgcaaatatgtccttaaacacttttttgatcttattttactaattcatacctgtaaccctgaattggtatagtctcagtccccattccagaattaatgctgggagcaactgcagaaagattgtgtgtaagtgggggaattgccacgcttggattccttgtgtggtccacgctgacattgctgcagtctttgaggcttgttgaaggcactattttgttgtggcttgtcctactgtcatggagacagctggcatttgaagctctattgcctttttcagctttttctccatcaatttttgagccttttattttaaatagtttataatccttaattttgggatcagcattggtatcctgatcattaacaaaaatattaataaggttaatgatctgaagagaatgaaaatttacctcttcttataaagtacttgtcaactagagcagaatatcataagtatcacctttttgaaactgttttctttattcttcctaggggattaaaattaaagccagattcttattcagatagttattgggaaaatacaaaaagaatggaaatgcaattcacacagctcactcagacacacacacacacacatacacacacatcagtggaaaaactcatggaagaggaatcaagaattccacttttgttcttacatattcagagtcatggaacacaaaactgataactctttcttcttttggtgtacttgatataagtggattggtggtggatttgaattaccttatcaagaacagatcctgggtagttcaccaggaaaagcaaacctaagttaagtatccaaatctcacttttcaaatttttacttcatataaatttctacagacaatatttttcactcatatcctttaagaaagataagtggggtgagggttgtttgttccatgtgtctgtgtgtatatgtgttcatgaaaacacatatctagatgttcttggatgaatgtgatttaagcactgttgcacagtctggcacataacaggtactcaaaacatgatatgttaagttttctaaacaggtaatatctactgagaagatacatttttacaactaaactaaaagttaacaatttgctcactgctcagaaaacttttttcaaaatcatattttttctcaaaaaatttaaaaaaataagtatattaaatctaaaatgtgaaacatgaacatttacctgtaccacaagtgtttttctttcttcaactaaggaatcatctttttctttttccttctttctgttttgggattttttagataaagaaacatttctggcatctttctgtacttttaactgtagttcttgggaaaacctacataaaaatataataaaataaaattgtaagacatggataaacctacaaaaaaattgactttcaagatatttattttttaaaaattgaatgttaaactagtctatgttattaaaaatgagaaaaatcctggcctagatcagcagtttggaaagggtggtgtgtagatctttggggatccctaagaacattcagaaggttcacaaagtcaatgctattattttaacataaagatgtttgtctttctcaccaggttaacatgaaagcagtggtggataaaactgctgacaccttaccaagaagaaaagcagcaaaaccaaaatgtactagcagtcattactttcttgataaccacacattctcagttgctttttttttttaaaaaaaaaaaaggcagtcttgcttaagaatgtctctgatgaatcagcaaaaaggtattgacttcattaaagccaaactcttaaacgcatcctttttttatggtctgtgtgacaaaatgagaatatacgtaaagcacctctgctacaaaccgaaacactatggttgtcttaagaaaaatgcttgcataattatttgtgatacaaactaaactagatatttttacttgaaagaaagactgacagaaaaactatggttattaagactttgggtctatgggaaacattttcttttaacaaataaacaaagtgatcttgtcacttcaaggaaaacagaaataattgtgttaatgataaaattcaaaattttatgcaaaaattacaattctgttaaacttgtatccaccactgtgagcttagcagcttcccaaaactcacaaaacttttatgagatagaatgtaatttttgatgctgtacaagaaatatatcaatatttttaagatctgcttaactcagcaaactaatattttccaaatgactaaagcatgatattacaaaagcatgcatgggtaaaagatccattaaaaaggcaagacagacaaatggattttaatttaacaaaggaagaaagactcaatgatatggtttcacattccacaatgcaaccagcctttaagaaactaccactgggccaggaacggtggctcatgcctgtaatcccagcactttaggaggcccaggtgggcagatcacctgaggtcaggagttcaagaccagcctgaccaacacagagaaaccccatctctactaaaaatataaaattagccagttgtggtggcacatgcctgtaatcccagctactcgggaggctgaggcaagagaatcgcttgaacccaggaggtagaggttgcagtgagccaagattgcaccactgcactccagcctgggcaacaagagcaaaaaaaaaaaaaaaaaaaaaagaaactaccactgtcaagttttgctatggtatcagagttttggtatagaatcaaagaatacccacaattatctacttacgtgaggccagagtttcttcatatacttccacaaaaacaacatatcacaactaattgagtacaaaagcaaataggaaaacctagctaccttttattaagctacgtgttactgccactcatctcactattctttgtttcgtcagctgcactgttgccagcagcttgagcagcacagaagaccatgccagcaactctggcacccacaggtttggcatatcaaggtctccaacacatcagcagtgtcagcagtatcaaaggacttggtgtggtatgagtttggcagcaataggagatggcacttttgtaactacatcagcatctaagatgatggcatcacacagttggtagcaacatagaaatcaatgatctgactggtagacgtcaccacagggagacagaaagaagacataaaatgaccgcttcatgaaaaccaagagcactaatttagtaaatgtaggagaccacccctaggaactgcattattgctaagggaatatgggggtagagtggtagatatctgagatcctgcaaagtaggtgggaacagaaataagagaagtgctatttgtgactattgtggaagactttaaccctaggttggtatggcctgaaaaacatgggtaagtactatacctctcagcaaatccatccatttgaaagaaatcatggtgtaggagctcagcacagaagggtcttttgtcggggtcaatatgtaagcatttctgaaaaattaagaacacttagagttcatatcaagaaaaactacctacatttaaatttataaatatagaaaaaaaatcctctttatagtcaacgatttttttttttaagacagggtctcactctgttgcccaggctagagtgcagtggtgtgatcactacttaaccgcagccttgacctctctaggctcaggtgatccttccatctcagtctcctgagtagctgggaccacaggtgcacaccaccacacccagctaatttttgtattttttgtagagacagcgtttcgccatgttgcccaggctggtctcgaactctgagctcaagctatccaccctcctcagcttcccaaaatgctgggattaccagcgcaagccaccacacttgcccgccaatgaattttacacatcaataatcaaggataaagaataaagcacaaatctagacaatgaccgtcagtggttgctagtatcacaaaaagaccaccaaacattcagtgtctctatatggaaatacacaaacctcctatgaagtagttttgccaaaaaatcaacctgattctgatcgagctctagctctactgtgagtttataagaaatacaggacacagaagaacatgtatactgcattatgtagaaaattctaaggacaaacaacttagtttcttcaacaaataaattgcaagatttaaacaaaaaagaaagagatgaagagaagcttataaataaagttttaaaaatatatcgaccaattgcaatctatagtcttcatttagatcctaattcaaactatgaaatgaaataaattttgtgaaaattaatgaaactttaaacatcaattagatattttatgatagtaagaaattatttggaatttttaaaacttaaggctattacagaatggaaaggaaaggatttatcctgtgcttatcactatgctagatgctttacaaagattattttattttattttattttattgcaaagtcttgttctgattcattaaaacccctaacatgccagtaaaaatagaagggactcaataagtagctttaaatgaacaagaaaatttctctgcataactgtgctacttataagtaaaataatacatctgggatttgcttcaaaatactccaaaaaaagttaaagagtgtagataaattaaacaagattatcaaaaggttgataattgtggaaactagatgataagtacatgaaggtttgttaaacaactattctttctattttcttttccgtttgaaattttccataataaaatgttttaaaagttttatatgattccttaaggtatgattaaggtacacaagttggacaatagttttacctttattccctttatatctccttacagatagatcacaaagcttgtaccaattaaaaatatttgcatctgttagaagattatgtaaaaaactggaaatgtattattctaagaacttgtttaattagttataagcttattaaacgtcatgagttaaagaattaaaaaacaaaaaaattgggtaaatcttatagcctagtgttttagaggtacctatcttatcaatatttaaacaatcttaactgatgagaactttttgagctaaaaattccccaaaaaggtcaaattttagagttgattctcacttgatagaatgaaaacctaacatcttccttaatcaaatacaacaaaaaagtattggccatttgtaaactggctgcagccaatacagtggctaagcaaaaacccctttgacaatatcatacagatcatgatcctatgccctacattttgttttttttttgttgttgttgtttgtttgttttttttgacatggagtctcgctctgttgcccaggctggagtgcagtggcgtaatctcagctcactgaaacctccacctcccaggttcaagcaattctctgcctcaccttcccgagtagcgggggttacaggcacgtgccaccacgcccagctaatttttgtatttttagtagagatggggtttcaccatcttggccaggatggtcttgaactcctgacctcatgatccacgtgcctcggccgcccaaactgctgggattacaggcatgagccaccatgcccggccatcctatgccctacattttaatattttcctacttctctatcctttatttatttatttatttaaagagagagtttcactctgtcacccaggatggagtgcagtggtgcgatctcagctcactgtaacctctgtctcctgggttcaagtgattctcctgtctcagcatcccgagtagctgggattacagacatgcaccaccatgcccagctaatttttttgtatttctaatagagatggggttttgccatgttggccaggctggtctccaactcctgacttcaagtgatccaccggccttagcctcccaaagtgctgggattacaggtgtgagccaccatgcccagaccctttttattttcttatcctacttttattttcttttccatttaaacaaggcgtgtattttaaatgttaaacgtaaaaatcatacagtgtttttatgtttttaatgtgtttttcagtgaggatgttttcacatttacaaaatgctagataacaataaatggtttctttttttttttttttttttttttgagacggagtctcgctctgtcgcccaggccggactgcggactgcagtggcacaatctcggctcactgcaagctccgcttcccgggttcacgccattctcctgcctcagcctccccagtagctgggactacaggcgcccgccaccgcgcccggctaattttttgtattttttagtagagacggggtttcaccttgttagccaggatggtctcgatctcctgacctcatgatccacccgcctcggcctcccaaagtgctgggattacaggcgtgagccaccgcgcccggccaataaatggtttcttaatgagtgttaaaacaggtaaaattttcagtcctttttctctgaagttacccccatcaaattatttaaattgtttctaaatgtacaaaaattaaaattattagaggaaattgttgacctaaaagatcaactagaggccagggctggtggctcacacctataatcccagcactttgggaggccgaggcgggcggatcacgaggtcaggagattgagaccatcctggctaacacagtgaaaccccgtttctactaaaaatacaaaaaattagccaggcatggtggcgagcgcctgtagtcccagctactagagaggttgaggcggaagaatggtgaagcttgcagtgagccgagatcatgccacagcactccagcctgtgtgacagagcaagactccatcaaaaaaaaaaaaaaaagatcaactagacaagtaaaaaaaaaaaaaaaaggtcttgatagtgcataaattccctgtcataaagtgtaaacaataagtatgattacctttgctaaatctatcaccacttcagagagcttaggatagcgtctttcaagaggttctctttccttgatttcaggcaaccttactccagcaaacacaggatttttattaaaaagctcctgatgccttggaattagattacctggaagtgaaaacagcacatatctctgttattatacaacatgatagaaatggtgaagagacaggtggtgtgaagtagaggaaatagtggaacacagcttatggagtttggggctctctcaacatgcaaaattgaccaaagacaatgccgttactgtggtggtatatggcagtcttaaggagcataggaaaaggacaggtaaaaaatattttataactttccagatataagtaccagcacttcgtttctaactagaaagcataaagtgctgaataaaacaacaaatatattaatagtcatatggacaggatctaatctagataaatcagttctcccctttaagaatttaatatttggtcaactgattttgtgcttatcttaaagtcagatttgagcactttaatcttttttctcaactttaatatctagttgaatgtagaatatatctgaaaattccactgtaagaaactattgtactgcttatttaatttctaatctgaaaacttcaaatcaaatagttaaattacccccaagtattttcccattatttccatttctaagctccatcttcaaacatgaagttgatatttcaacaaacgtaagattttgatagtccagctttgaaattctgtcaaaagcactaatagcagaagtccaaatctgtgccaagattaaatcaaccttggaaatctctgtgtctctcctcttgaatgtgaaagtaaggacagtagtcacattacaccaaatgcttactgactcaagaataataaatgatcattgcatcctctctacatgtaattaacggtatgtaaaagtacagagaaatgcacaacctctgctcttttcctctctcttgaggggaaaggggatgtgagcgtgattaagaacatgcaccagggcgggccacagtggctcacgcctgcaatcccagcattttgggaggccgaggcaggagaatcgcttgaacctgggagtcggagtttgcagtgagccaagattgccactgcaccccagcctggtgacagaacgagactccgtctcaaaaaataaaaaagaacatgcatcagatagaccaatgccagactgaaggaaaaaataaattaaaacacacacgtggctgggcgcggtggctcacgcctgtaatcctagcactttgggaggccaaggtgggcagatcacctgaagtcaggagttcgagtccagactgaccaacatggagaaacgccatctctactaaaaatacgaaattagctgggcatggtggcacatgcctgtaatcccagctactcgggaggctgaggcaggagaatcgcttgaacccaggaggcagaggttgcagtgagccgagattgcgccattgcactctagcctgggcaaggagagcgaaactccatctcaaaacacacacacacacacacacacacagagttttcctatatgctccctaccttcacttaaaacatatataatctttaatgcaacagcttaaaaaatcacaaacacacaggcacaaacaaatatgcagaaaaatctctaaaatttaaaatgcagatgtgtaaccttacctaaacacatcataatatgatatagctgatcaatatcagaatctccaggaaataggggttcccccatgaacatttcagttaccagacaaccaatggcccacacatcaacagccctgaaagaaaagcaatgtggtgtaaaatctggcatcctaatatgctccaaaacccaaagctttttgagcactgaggtgatgctcaaaggaaatgccaaccagagcatttcagatttcagattctcagatttggcatgctccaatggtataatgcaaatatcccaaaatccaaaaaaaaaaaaaaacccatctgaaatctgcaacacttctggtcccaagcatttaggataaggaatactcaacctatagtaagccttaaattacccatgaaatgatttttccctattaaaattctaactcccaattttacataagtgagctttccagaaacttcaatcatgtgacataaaagggaaatgccttctgaaaagccaaaacagttattatgtatactttattctggaaataaaactctcaggctccatttagagcctattcattctttgtttacgcataactctagcaagcttgaccaatctatgctatgccatcatacactgaaaacagcataccagaaagaggaggtggctgctaaggataaatacagtaacaatgaagagaactgagggatgatagggataatttttttttttttcttgagacagaatctcactctgtcgcccaggctggagtgcagtcgcgtaatctcagctcactgcaacctctgcctcccaggttcaagtgattctcctgccccagcctcccaagtagctgggattacaggtgcatgccaccatgcctggctaatttttgtatttttagtagagatggggtttcaccatgttggtcaggctggtcttgaactcctgacctcatgatcctcccgcctgggcctcccaaagtgctgggattacaggcatgagccgctgcacccagcctagggataaaaattttgaaactatcttaaaaatcagttacaagaactcaaagaatatgcaagcatcatttggcataggaacaactaccttaaaatgcttaaggttattgctgaattataaaatggcacaaaaattataacatggtagcaaaataagaactcagtaatcaagaaaataataaataatgtttagtgtgctctgacaacagaacttgtagaaaatattttagaaagatttcaatcaaaagcagtaaaagttacaaccctttcttctttgaagaattcccttgtgaagaaaatttatgttttaaaaacattttacttaattatatttctgcctccacccttgcttactccatcttccccattccaacaatgtcacatttaaccaatcaatgttcacctctctttacaagtgataaatatatctatttccaacccactgtataaaatagaccacttaatttccccacctctaaaataagtatacttgtttcacaggaatgtttaaaggggaagcaccaaaaatgattacaatttactttatatagtccctgaaactcaagccttcctttcagtattagagggatcatttactatatcataaacatattccactatagcaagaagcaagagtaaaaatctactcctccccattactgatgtcttacttgccatacttgacatcaccaaccaatagttctggagctctgtaccatcgggttgccacataatcagtataaacctccccaggagctgccaatgttcgcgcaaatccaaaatcgcatagcttgacaacgccagactgggagactaatatattctctggctttatatctctgtgtatgatctagacaagaagcagagtgtgacggatgttaaataaaattaattattttggggcacctgctatgtgcagggcattgtatgttgtccctataaagaatacaaacaaaagcatagaaagttgctcctagccctcaacaacctaggacctagttgggcaagaaagaacatctatacttgaaattttatttaaacaatcaaaaacattggataaaatatattttttcaaattactaaatcaactgttcagttaatgtactgctctcaagactaagagagtaaagctatcattgaagctgaggcagtcaggggaaatttttatgaaaggggtgggctctaacataggtctttaatactaagtatgacctagataaataaagagaaagaagggcagcccaagtgaatgtaacaaggagagcaagaatggaaatggggatagataagagattgtggggaaaaaaaaatttttttttgagacggagtctcgctctgtcacccaggatggagtgcagtggcgcgatctcggctcactgcaagctccacctcccgggttcacgccattctcctgcctcagcctcccgagtaggtgggactactggcgcctgccaccacgcccggctaattttttgtatttttagtacagacggcgtttcaccgtgttagccaggatggtctcgatctcctgacctcctcgtgatctgcccgcctcggcctcccgaagtgctgagattacaggcgtgagccaccgcgcccgggccaaaaaccttttttttttttttttttttaggcatcgtcttgctcttgtcgcccaggctggagtgcaatggcgcgatttcggctcacttcaacctccgcctcctgggttcaagcgattctactgtctcagcctcccgagtagctgagattacaggcgcctgccaccatgcccaactaatttttgtacttttagtagagacggggtttcaccatgttggccaggatggtctcaaactcctgacctcaggtgatccacctgcctcggcctcccaaagtgctgggattacaggcgtgagccaccacgcctggccagaaaactgttttttctagagtataggttgtgtgaagtggaggcggaatatctcagctgacatactaggaagtgtggcaagaccctgggaacccatggaagtgatagacaatgtggtgtttaaaattgatgttggccataaatgagctaaatcagagagaaagacgagaggcaggaagaagagcagtgggaccagtatgaggtgataaaggcctaacctaggttggtgctcagaggaatgggaaggaggaaatgcagtttagaaatacaataaatcaaaaatcaataggccgcacgcagtggctcaagcctgtaatcccagcactttgggaggccgaggcaggcagatcacttgaggtcaggagttcaagaccagcctggccaacttggtgaaaccttgtctttactaaaatacaaaaaagtagctgggcgtgctggcacgcgcttgtaatcccagctacttgagtggttgaggcaggagaattgcttgtacccaggaggtggaggttgcagtgagccaagatcgcaccactgtattccagcctgggcaacagagcgagactccatctcaagaaaaaaaaaaaaaaagaaaagaaagaaatagaatttagaagagtcgtagatattttgtagatattttgtttgaacctgagaatttaaaagaatggtggtttcattttcaaaattagaaaagcctagagaaagttagttttaatggaataattagtttagttttaatcattggacttttgggtggaatgctgagcacccaagtatagacattcatcaggcaattagaaatgtaaagagtaaacaaaaacattagtgattaaaatttctaaaggagagactttgtaagaataaaacaggatgctgatattcagataatatttaaaaatctggccaggtgcggtggctcacgcctgtaatcccagcactttgggaggttgaggtgggtggatcatgaggtcaggagtttgagaccagcctggccaacatggtgaaaccccgtccctagtcaaaatacaaaaattagccaggcactatggcaggcacctgtaatcccagctacttgggaggctcaggcaggagaatctcttgaacctaggagggggaaggttgcagtgagccgagattgcgccattgcactccagcctgggcgacagagactccatctcaaaaaatatatatataaaaaatattatatagatatatatcatatatgatatattatatatataatatatatatatttaaaaatctacagctaggcaaaagacattattaggcctaattctctaatataagcaaattgtattttgaaaactaaaaaagatagatttgttttaactctttcggaagaccagcatcctaaacggcaatctgccattgctgagcacgttgtataggctaccaactttattaccctagatatcagtgatgaggacacaggtccagtctcagaccacctgtgctgtagtagaaagagctaaactggggccgggtgcggtggctcacacctgtaatcccagcactttgggagaccgaggcgggtggatcacgaggtcaggagatcgagacatcctggctaatatagtgaaaccccgtctctaccaaaaatacaaaaaattagccaggcgtggtggcaggcgcctgtagtcccagctactcgggaggctgaggcagggagaatggcgtgaacctgggaggcggagcttgcagtgagccgaaatcgagccactgcactccatcctgggcgacagagcgagcctccatctcaaaaaaaaaaagaaaaagaaaaaaagaaagagctaaactgggagtcgggagacctgggtctagtccctggttttcagtacagccatagacaactcaatctttctaagtctatcctctcggcccacaaatgagagggctaaagtgcatgatcaccatgtttcttcccaactctaataccttataacttaagtaacacaatagattctaagtataaccaagatgatatgagttgaatttttcctaaaatccatcattgcagactggggtggccagagaaagtactatgaaaagggtaggctctgacatgggtctttaatactagatataacctaaataaattatgatacctagtaatttcagtaaaaaaagtcgtttagggttctacaaacctcataatgttctgtactatttgggtcaaacttcaatgggcagcaatcttaaatttgtttttaaatatgttattcagtctggctcataaaggattaaaatcatatttatattttaaaaaattcaagtgctcacatatatagatacatttaaaaatgaataatatatttgagaataaatgttctcattttcttaaagtcaagcatctcatccttatgtgtacatatatgtgtttatatatatgtatgtatgtatgtatatatctgtgtgttttattccagccactaccgttattatctgtctacattaaaaagagaaatgttaactgcccagaaaacaaaaccttaaaatatacctttaataataatggtaataatagctgacacttgaatacttatgtgtcaggcactattctaaatgtttttcatgttttaacttattttattctcataataaccctaaggataggtgctattattatctccatttaactaggggctgggagtaaggattggagaaaaggtactagggtttgagaagaaagagggtaagaaatcacaatctagaagagtttaagagtaaatggaggctgggcacagtggcacacgcctgtaatcccagcactttgggaggccgaggtgggccgatcacttgaggccaaaagttcaagaccagcctggccaacatggcgaaaccccatctctactaaaaatacaaaaattagccaggcatggtggtgcacaccggtaatcccagctacttgagaggctgaggcaggagaaccgcttgaacccaggaggcagaggttgcagtgagccaagatcgtgccactgcactctagcatgggtgacagagtgagattctgtctcaaaaaaaaaaaaaaaaaaaaaagagtaaatggactggaaaaaaagtagtatgccaggcaacactaataacactaatgctcccttgagacaagtgttcataagttagagtgagatcagttctccacccataaaaattcacattttctatagtttaaagagatatgtaaatgttctgaagcttagcagggaaccaccttttttttttttttttttgagatggagtttcgttcttgttgcccaggctggagtgcaatggcacaatctcagcttaccgcaacctctgcctcccaggttcaagcaattctcctgcctcagccttccgagtagctgggattacaggcatgtgccaccacgcccagctaattttgtatttttagtagagacggggtttcaccatgttggccaggctggtctcaaactcccgacctcaggtgatccacccgcctcggcctcccaaattgctggaattacaggcgtgagccactgtgcctggagaaacactagattttaaaatctttttttttgtttttgagacagagtctcgccatgttgcccaggctggagggcagtggcacgatctcagctcactgcaacctccgcctcctgggtccaagcaattctcttgcctcagcctcccaagcagctgggattacaggtgcctgccaccatgcccggctaatttttttatatttttagtagagatggggtttcaccacgttggccaggctggcttcgaactcctgacctcaagtgatcagaccacgtcggccccacaaagtgctaggattacatgcatgagccaccacaccaggcctaaaatctctttccttaaacacagaatggcactcatgccagcagtacttgactctaaactgcctggatgtatctgtacatctaaaggtagaatgtgttatattaaacatgggttgattcatcatgaaagtataaaaataaagggacacagaagcaatgtaggcaggacacattcaaatgcgcttctaatgtgagagagacaatggttctttttgcttactggttccactggcaagcctatccttagtacagagatgaatgtagggcattcagccacctaactccaaatattacaggcccattgggaagatatcatcatttttatgaagaaggatgaatcagtatcttttaaactgatacattaagtatttgattcactaacacctcatgctgatctgatttcctgcaaatccaacattattgttattctactttatatatttcaccccgtaacaattatctctctttgcaatttactaaactggcattcagtctcctgagtttggtcaatatgagtctgccctaagagacagatagtctcaaaattaggtttctcaaaatagattttctgggccgggagcggtggctcacgcctgtaatcccagtactttgggaggccaaggcaggcggatcacgaggtcagaagatcgagatcatcctggctaacaaggtgaaaccccgtctctactaaaaatataaaaaaattctccgggcgtggtggcgggcgcctgtagtcccagctactccggaggctgaggccggagaatggcgtgagcctgggaggcggagcttgccgtgagccgagatcgcgccactgcactccagcctgggcgatagagggagactccgtttcaaaaaaaaatagattttctgagcctggatcattaaaaagttgccaggaggccactatggaaggcctcctaaaaaagggcagtgtttttcccagtggaaactaggtatctgcctctactgagcaatttttttatgtatgtaaacttcacactataactcagtaacataacaaaactacacaataaaagacagttaaaaaattagagacagtgaataataataataaccgaaaagaaatatatcaatttaggtggcaggtatgtaaaatgattttttctttcttttataattatctttagttttaaatttttctaccattaatatttattactcttataatcacacaaagaatgtcatttaaaatattttgtaaaactggcaaaatctatgtgttgagctattcatttatactttataggtatcattcttcttgtaagtgcttttatatgatactcaaagtatataaaattattgtgatagactacagggtaagggtagaaattttcaaacattcacactttgtaattaggcaagagaacacaaactaacaaatacacagacccttgggtctatacatttctcaaaattcatcacttaaaatttgtgcatttcgcttagtaaatattaccttaaaaaagaacagaaaatagagccaggcacggtggctcatggctgtaatcccagcactttgggaggccaaggcaggcagatcacctgaggtcaggagttttgagaccagcctggccaacatggtgaaaccccatctctactaagaatacaaaaattagccaggcgtagtggtgcatgcctgtaatcccagctactcaggaggctgaggcaagagaatcacttgaacctggggggcagaggttgcagtgagctgagatcttgccactgcactccagcctgggcgaaagagcgagactctgtctcggaaaaaaacaaaacaaacaaacaaaaaactcagaaaacaaatatttaactccaattaatagatgcacagatgaagtatttagtgttaaagtatactgatgtctgcaacttattttcaaatgcataaatcaataagacagattaaaggattaatgaataaatatgtgataaagcaaattatttaaacccaatacttacattgtgactgtgacaaaatccaattccattaataatctgaaacaaatacttttgaactacttggtagtctagtccatttggaaagagctccaagtcatcaagaattgtgtggtcaacaaattcaaagactaggtaccatcgtttttttttcttacacacttccaagagattcaccaagttttcatgcctaagttgctgttattaaaaaatgcaaaatagctgttatttaaaaatgcaaaatagtttatataaactaagatcaaattattagcaattaattatttaaaatagatctcagcgtaagaaaaatatataaataaaatgcatacatagtgtaaattgtaaaagcatattctggtttttaaactacaattgagagactatattgctcctttctcctctcagagaacaaaataaagctaataagaaaaataagtgtaactccatctttgctaaaactaagagggatctatgaccccctactcacaacaaatgagatgggactactaaatctaatcacggtcaaacaggagtataggaaggcaccaaaagatcatctgtggctacaaagctggaagcgtaagagttctctgaagccagtgacataccctgaaaagacaaaaaagtcctcctttaatataatggaaaactatgtatacatatatatagtatatatatatatgtatattcatatatatatatacactatatatatatgaaataaggctcatagacagcagtgaaaacatccctagaactgaatggcaccaagaaacagcattggggaagggctggataaggaatcacacagaaacacatttgctggaaacaatctctcagtgaggcagtgtagaaggcaaaacaattcattatgaacaagcctgcaactgcaagttttagagaaattaaacctaatagaattaaatcccacactgaggcatatgtgataaggaacaccattgtgaattatggtaaattcctgctagcctggaacaaagtcatggcctctccccagaacctcctacaaatagtcctccaaagactcagactttattataagaaacaatcaaaaaggaaccaatcaaggatctattcaaagatgtaagaaatggggaagaaaggagaaagaaacataaatggtagattaacactcaccagaaaaaaatgttgccacctttaaagggaaagaaaccaatggaatgcagaatacagctctcaaaatcctcaagaaaatccaagtatgatccaggaactttatacccaaccaaactgtcattcaagtaaaagcatgaatgagcattcaagtaaaaacaacatgagcattgaatccatttaaggcaggactaaatcttatacaaatgtgggcatcatggttatgaaacagaaagtgaacattttaaatgcaacaatgcacaaatgatatagaagatgtaaacaagataaaagtgtatatatacaccaggtgcagtggctcacacctgtaatcccagtgacttgggaggacaaagcaagagaatcacttgaggccaggaatttgagaccagcctgggcatggtgagaccccatctctacaaaaaattttaaaaattagcctggtgtggttgggcacacctctagtcccagctacttgggaggttaatgtgggagaatcacttaagcccacgagttggaggctgcaatgagtgtggtgagccatgatcatgccactgcacttcagctcgagcaacagagcaagaccttatcttgaaacaaaatgaaaaaacaaaacactaaagtaaataagatattttctaaaatcagatggtaggtgagtgggagagaaaatgaaatagaaatagaataattaatttacaaagaagtaactgtgttatttaacactatagttatcaaggtaagcaatatggctaggcatggtagcttatgcctgtaatcccagcgctttgggaggctgaagtggagggatagcttgaggccaggaattgtaggctgcaataagctatgatcatgccactgcattccagcctgggtggggcagagtgagactctcttaaaaaattaaaaaatgaaaaaagattaccaaggaaacatatccaatataaatataaaaataatataaggaattcaggggccgggcacagtggctcacacctgtaatcccagcactttgggaggctgaggcaggtggatcacctgaggtcaggagttcaagaccaacctggccaacatggcaaaaccccatctctaccaaaaatacaaaaaaattacccaggcgtggtggcatgcctggccaccaccatgaagtaatgaagtaatatcaatgaagtaatcccagtttctaaggaggctgaggcaggagaatcgcttgaacccaggaggcggaagttgcagtgagctaagattgcaccactgcactccagcctgggtgacagagcaagactccatctccaaaaaaaaaaaaaaaaaggaattcaaatatcatatagaaaaatgttttttaaagagttatacatcatagaatattatgcagccataaaaaagaatgagatcatgtcctttgcagggacatggatggagctagaagccattatcctcagcaaactaataggaacagaaaaccaaataccacatgttgtcacttataagtgggagctaaatgatgagtgcacatagaggggaacaacacacactggggcctaccggagggcaaagggtgggagaagggagaggaccaggaaaaatgactgacaaataattgtttaaacccaagacttacatcgtgactgcgacaaaatccaattccattattaataatctgaaacaagtacttttgaactagttggtagtctagtccatttggaaagagctccaagtcatcaaaccccatgacacatgtttacctatgtaacaaacctgtacatcctgcacatgtacccctgaacttaaaagttaaaaaaaaacacaaacttctaccctgccttcccttaaaacagacattttacaatgtaaaagaagcgttgccaagaaaaaaataaaagttataaaagagtatgatattatacataataataactaatacttacacaatgcttactatgttccaggtactattctaagcacaaaagccttatgaaataggtacaattattatcctgctttatagctgaagcaactaactcacacagaggtcaaggaacttgtccaaggtcacacagcaataactggtagaggcatgattaaaacaccttctcaaaaaaaccaaaaaaactaaacaaaccaacaaaaatgccccaaaacccacaaatttcatatcctaatggaactataaattctgacaagttctattttatcaaattaagaaatctaaataatactagaatgtcacttgttccattgggctgttttggcacatttctaatagaagaaaacattacactaaaactttttactctttaaaaattcacactatagcaccagataatttatctttctctactctatgtcaagtccttcttgcaaagatttccacagtagctccaaacctgcaatcataattaaaacagactatcggccgggcatggtggctcatgcctgtaatcccagcactttgggatgccaaggcggacggatcacgaggtcaggagttcaagatcagcctggccaaaatggtgaatccctgtctctactgaaaatacaaaaattagccaggcgtggtggcaggtgcctgtagtcccagctactcaggaggctgaggcatgagaatcgcttgaacccaggaggcggaggttgcagtgagccgagatcgtgccactgcactccaacctgggcaacagagcgagactctgtctcaaaaaaaaaaaaaaaaaaagcacagactatcagctccacaggttctctgtctttgtgcttatatttttaatggcagatggttaccttctttggtaatggcagactgagtaactcagaccaggcctccaattgaaaattctttttttttttttttttttttttttttttgagacggagtttcgctcttgttgcccaggctggagtgcaatggcgcgatctcggctcatcgcaacctcctccgcctgccaggttcaagcaattctcctgcctcagcctcccgaatagctgggattacagacatgcgccaccatgcccagctaattttgtatttttagtagagacggggtttctccgtgttggtcaggctggtctggaactcccaaccttaggtgatccgcccgccttggcctcccaaagtgctgggattacaagcgtgagttgccgcgcccagccattgaaaattctttaaaagttggattaattttcaaaaaatcttcttaaacatataaaaggctaaaacgacagtgaggattactgggctaaaatcaagaacatgagaatccagagagttaacctcgggactcaaagctaattttgacatcaagtaacaagtgtggaaatgagctttgatttttgtggctccccagggctaaaagggaaaagccaaagtccaaaagccttctaaaggtgggatatctgagaaaccacctccaattaaagctaggacccaaaaaactacatcctccagagtgaaaatgaacagaaataaacgaggcatcactagacttaatttaacatcacgttcaaggaactaaaagccttgaacatggattcacatactggactgggagcatctccatgtacctgtcagaagcaaatgaatatcacctctggacaaagaaaaccctaccttagcctcaaaatatttctacaaataaaatttcaaaaacaacattcaattctaaaggataatgagaaacacaagataaaaagagactataagcaagaactttgaacttactaaggaggtcctgagctggtagtgtgcttgtatcagacagaaaccagaactgggaaaattttaatgtaaatatttttcattatgaagggtagttaattactaaagggggtaaaagaagactgtaagggatatgtttaaactagcaaatacaggaagccccacttttagggctgaaggaaaatacatagggacaagaaggaactaaaaatgtagaagagcccccaataaccaccagacacatagtcctcattggaaatggcccagcagccacaaaaatctaaagattgccaatagtgaaaaaattcaccagagcacacaggccagagatggtttgtagagtggccagcagttggtagagaaactcaccagaatgtgcaggtaggccagaactggtacttgaaagatgctgaagtgagctaacagacctcccacatggtgatgggctcacagctgtataaaaaaaaaaaaaaaaaaaaaaaaagcacaccagaagctggaagaaaagtctcttcctcttgctaaggaccgacaatgtctttccatgccctctatctgttgacaaaacctaaaatcaaatcagcgggcaataaaaaagaaatgtttacagagtccagttctaatatcacaaagtaggtaaaaaaaaggagtgatttggagttgagagacaataaattgattactggcacagtgcccatgaacatggaagaatgaaataaaaattgtctgtggagaaaaatatttttaccttagcctcaaattatttttaaaaagtaatctttcaggacaggcgtggtggctcccgcctatgattctagcatttgggtaggttgaggcagaaaaattgcttgagctcagtagtttgagactagtctgggcaacattctgagaccctgtctccacaaaaaattaaaaaaattagctgggcatggtggcacatgcctgtagtccaagcttcaaagctacttaggaagctgaggcaggaggactgcttgaatctggaagattgaggctgaagtgagccataattgcaccactgcactccagcctgggtgacagagcaagaccctgtctaaaaaataataataatgataataatagtatttcaaagataaggttcagcacaaaattgaagataagcaggcacacaatgaaataagacaccataagtaagaaataccagaacatatcggcgattgaaacagatacagaatgacttcagatattgtaattatcagatatggactactactctttaaaaaagaaagccaacctcaaaaaatggagggaacttaaaaccatgaaaagtaacataacagatgtggacccaaataaaaattctaggatagaaaagtataattacttttgttcacagtaacagtagacttggtaatttgtaacaattctccaactgaatacaagtagaaaagctggacaaaatatataacataactacttggaggaacgaaaaagataatatagtaaaaaatacctgggctaggaagacag

SEQ ID NO: 300 - DNA, 4417 bp, Homo sapiens
tttgtgattagacttgtgggctgtgtgggtgtcagatggttgtctctcagctggtgggcgtccagaaggatccttgtttgggcaaggctctttgagaaaggagaatctgggttgccagggattcccacatgtggtcaccagctccccacgcagaccagctcacgatttcccagttacaccgggcaggtgggaaaccgttctgctttctgtggaaaagattctaacttggttccctgccatccctgaatacaaacgggttggtttttcttttttgagcttccaacccttgcagctttccaaaaataaatcaaaccagccatcagggcaccgaaataatactactgctaataagcagcttcgcctagacttagataaacaacacttctgaggtaaactttgccccggaggtctggagacacttttttaatgtaacctgcttactaataattactagacttcagtgcattaaccctggaaatagattttaatagccaccccttaaaacaaaagacatgaaaagataataagaaaaaagtgccgcaactattatagaaaaacacttggcagcctgcttcagcccaagctgaggccacctctagcctctgctaaagccccccactcccaatggtccccgccaaccggataagagtgcgcgcgggacccgccttcccctctcggcaccgcccccgcccccgccccctcggctcgcctcccgcgtggctcctcccttttccgctcctctcaacctgactccaggagctggggtcaaattgctggagcaggctgatttgcatagcccaatggccaagctgcatgcaaatgaggcggaaggtggttggctgagggttggcaggataaccccggagagcggggccctttgtcctccagtggctggtaggcagtggctgggaggcagcggcccaattagtgtcgtgcggcccgtggcgaggcgaggtccggggagcgagcgagcaagcaaggcgggaggggtggccggagctgcggcggctggcacaggaggaggagcccgggcgggcgaggggcggccggagagcgccagggcctgagctgccggagcggcgcctgtgagtgagtgcagaaagcaggcgcccgcgcgctagccgtggcaggagcagcccgcacgccgcgctctctccctgggcgacctgcagtttgcaatatgactttggaggaattctcggctggagagcagaagaccgaaaggtgagtcggcctgcggactcttccggcccgaacttctcttacctaccccgcgctccccggtgcagccgggctgtggaaggcttgcaggggaggaagctaaaaagtttgcacagggcaactcccgcccttgctccctcgggactctccgtggagctcccacggactgaaagagcgtgccccccaacccgaacgagccccgccggggcctttgcaaagggcagcagtggccgtcgctgcccgtgcggctcccgtggctggcagcctgtggcaggggcactctcgggacttctcacgggacgcccggtccttgggcgtgcaggggtcatggggggtgacggggccgcgggagcgccgggttttcgtagagcccaggtgcgcggtggtgcttgcattcgagagggaggggcgtggtaccggacgaggggggcggcgatggccccgagggcaccggggctgacgggacccctcgcccttgcccgcgtgtaggatggataaggtgggggatgccctggaggaagtgctcagcaaagccctgagtcagcgcacgatcactgtcggggtgtacgaagcggccaagctgctcaacgtgtaagtggggcccttgcgcgtcccccatggcaccccttcccgccccagcccgggaggtcgccttggctgggcgcccctcgcccggccgcgccacttcctgtcgcttttctgcctgtctcggaagggagggggcgagcgggccgggcggcgacccccagggacccgggcaggggttgagggcgcccgcgcttctgcgctcactggccccgcccgctgcccccagcgaccccgataacgtggtgttgtgcctgctggcggcggacgaggacgacgacagagatgtggctctgcagatccacttcaccctgatccaggcgttttgctgcgagaacgacatcaacatcctgcgcgtcagcaacccgggccggctggcggagctcctgctcttggagaccgacgctggccccgcggcgagcgagggcgccgagcagcccccggacctgcactgcgtgctggtgacggtaagggactgggggactgcagcctgcagggtagagccccggaaggacgggagtcagggctgggttgcctgattgtggatctgtggtaggtgggggtcaggagggtggctgcctttgcccgactagagtgtggctggactttcagccgagatgtgctagtttcatcatcaggattttctgtggtacagaacatgtctaagcatgctggggactgccagcagcggaagagatccctgtgagtcagcagtcagcccagctactccctacctacatctgcactgcctcccgtgactaattcctttagcagggcagattagataaagccaaatgaattcctggctcacccctcattaaggagtcagcttcattctctgccagtcagagctaaaaatagaaattgtgtaggagacaaaccttgttaattccctagaaatacattaagaggatagagtggaattttttttctctgcaatcttgcatttttttaatggctctttttttttttcctgataaaaacctttggtaggtagggaagttatgttttcaggggtaaatgtgctacttttgtcttctaaattttgctcttttttgactggtctagtcaagtgacagcccgattattttgctactccttaaaagtactattctgtctcttggagtatggttgatggcaattccagttaactgctgtgcagctctcatctcattgtgcacacagcatggaaatctttctcaaaactgtttcactcaggtcagggtaacaagtttggtagagcaaaccggtgaatgatactctcatgcaaaactgaacagatatgcaaacatatgtatgtggttcagcttgggttgcatgggttcagactttgcaatgtgtagtttaataggtaattacccttaacgcttttgcagggaacccaactaccttgaagaaactttaatttttttgtgcttctaatttgtctccatgtcacatagccaaaatatagaatgttcaagtgttttctcctcaaaagtataattactagaatatactggtttttaaaataagtttatttttataaatttgtttccagaatccacattcatctcaatggaaggatcctgccttaagtcaacttatttgtttttgccgggaaagtcgctacatggatcaatgggttccagtgattaatctccctgaacggtgatggcatctgaatgaaaataactgaaccaaattgcactgaagtttttgaaatacctttgtagttactcaagcagttactccctacactgatgcaaggattacagaaactgatgccaaggggctgagtgagttcaactacatgttctgggggcccggagatagatgactttgcagatggaaagaggtgaaaatgaagaaggaagctgtgttgaaacagaaaaagtaagtcaaaaggaacaaaaattacaaagaaccatgcaggaaggaaaactatgtattaatttagaatggttgagttacattaaaataaaccaaatatgttaaagtttaagtgtgcagccatagtttgggtatttttggtttatatgccctcaagtaaaagaaaagccgaaagggttaatcatatttgaaaaccatattttattgtattttgatgagatattaaattctcaaagttttattataaattctactaagttattttatgacatgaaaagttatttatgctataaattttttgaaacacaatacctacaataaactggtatgaataattgcatcatttcttattgtgtgctcttgtttcttttaacttgtactttattaaacacattttactgacgctttgctctataccaggtctataatcagaaagcaggtgatttaaaggagttggagttgtcaggaaaaagggatggttagagattcagcttgcaaaatttgaataattaaagataaatgatattagcgccgtaataagattatacacaaaatgttgaggaggcagagaggacagagtgactaaagttacctaccagtttttactgaagagagatcattttatgttggtcttagtgagttttatttccctagttacagagggcaaagggatattgctagcagctgcattagtttgtgcaaaggtgtggaggcctgaaagaccacaaccaggtcagta

SEQ ID NO: 301 - DNA, 31737 bp, Homo sapiens
gatctcctaatctaggttggggacacaggagcatgacaatcacaagtcaaaattaggtgtggaacctcagggcggagctggtgtcctgccagagatgcctgggggccggcgggaggacttggaggaggagaggctgcagagggcagggacacagagtagggggccacacaaagggtggctcagagtggaggaggggcataaaggaagagccatacataatcagcagctttgaagggtgttggagcctgccagccacagaggacttcccagggagggaatggggcatagtgtggaagtggtgccctcattttcagaggctgcagacacttcgctggaaggcacacttgccacggggcaggcagtgtggcagtcagaaatgtgtgggatggaatgggcgcggtggctcacgcctgtaatcccagcactttgggaggccgaggcgggcggatcatgatgtcaagagattgagaccatcctggccaacttgacgaaaccccgtctctactaaaaatacaaaaattagctgggcatggtggaacgcacctgtagtcccagctactcgggaggctgaggcaggagaatcgcttgaacctgggaggcggaggttacagtgagcagagatcatgccactgcactccagcctggcaacagagcgagactctttcaaaaaagaaatgcgtgggacagaatggcgggtccatcctggacgggatggggcccctgacccctgtgtgcctgcgctctgccagctcctgcgcagagcaggtactcgggggagggaggatggtttgctccaaactcaggtcccaactggtgtctgacttggccgcagaatcctttgggtcctggtttcttcatacatgcaatattgggggtttggccttgggggtctcttccagctgagtccacttctgtccccagcctgtaaactgtctgcacctattgactcttgatggtctctgagggactcaactttaggaactctgtccgttttgtgctgctgtcacagagtgcttgagactgggtaatttataatgaacaatcaactggctcacggtactggacaggtgccagcatctggcgagggccgtccagctgcgtcatcacatggtggaaggcaggaggggagccaccccacccttttataaccaatcccagccgttagggcgcagccttcatggcctaaccaccctctgaaggtcccactcgatactgttaaaaggcaatgaaatttcaacaggttttggaggggacaaacattcaaaccatggcagaaagtgtggaaggagcaataaccacactgaacagaatgaccatggtaattaaaccccaagtgaaaccatgacctgttttacatcatcctggagagaacagtgcagctccagtacttgctgagctgcagagacagggtccatccaactcgacagcatccagcagccactccaggccgccagcagacagatgttgggagcagcactgatagtttgggttttcgtttgtttttttaagacagggtctcacttgcccaggctggagtgcagtggtgtgattatggctcactgcagcctggaactcgggctcaagcgatcctcccacctcagcctcctgagtagctgggactacaggtgtgtgccaccaaatccagctaatttttgttactttttgtagagatggggtctcactatgttgcccaggctaatagatttttttaaatgatcatacaggacggctgggtgcagtggttcacgcctgtaatcccagcactttgggaatcccagtactttgggaggccgaggcgggcaaatcacctgaggtcaggagtttgagaccagcctgaccaacatggagaaaccccgtctctactaaaagtacaaaattagccgggcgtggtggcgcatgtctgtaatcccagctactcgggaagctgaggcaggagaatcgcttgaacccaggaagcggaggttgcagtgagccgagatcgcgccactgcactccaacctgggcaacaatacaagactccatctgaaaaaaaaaagatcacacaggaaaacagaagttcgattttacgtcgtacactgctgtaatttcagcacatgtggactcgtgtaaccaacaccataaccttccatcacccctgaaactccctcccgccagccctttagggttgcccctccccccgaaccccaccagcccctggtgaccactgatctgtcctccaacccatagtgtttttccgggaatgtcacaaaaacagaagccgaccatgggtcacctttctggcgcctttctccccgcacaaagtctttgtccttgtgaagttgtcacgtgccaaacgcttgtccctttttcctgctgggtaatactcccggtgccgcccttgctgttcgtcgatgcacatctggctgcttttcgctggctgcgagcggagctgctagggacatggccacggggctgtgagagcggagtttcctctctccggtgaccctgagctgcgcctttctcagccgcctcccgaggccccaggcgctctgcgggggctctggcggggtggtgggggtgggcgttctcgttgtttcagcggcgctgccccaggccctgcgggagggaccgtgggacccgagacatccccgcctggcctccgctccccacccgggagtggggctcgcacccccccaacctcgggtaaagacgcttctggaaggaagggcgccccgcggaccccgcccaaccctgccctgcccagcccagcccagcccagcccttcccggggcggcggcgcgggaagcaggcggcggcgcacgggcgtcgtcatggcaaccccaccggctccgggggccgggaccgctgccccctccgcccctcgacccccgcccccccgcccttcctggctgcggctggacccggctgcgcggggcgcgaggctgcctttcccgggatcaccagggaccacccggcgcgctccccgggaatccgcacccctggccccagcgctccggagcgacccgggtcagcccctggctgcctgcaatgggcccccgggcgaaccccgggcggacccaggagtgagcacccggtgcgcggcaacgatgatcccgcaagggaagctcacgggaggcaggagctgtggcagccgccccaggatggggcgcggggagcgcgctgagctgtcctttcccgcagcggccccgcggttgaagcgtgggcttgggttttggtttttcttctgtggcaacagttctgttgagatattactcgcctgccatacaactcacccattttaaaagtacacctcaggggtcctgcgtgtattgacaaacccgccgccgtcaccacagccaatttcagaacattttcatctcttcaaaagaaaccctgtacccttcagctgtcaccctcctggtccccatccggtcctcgtcccgccctcagcagccacgcactgcctgtaaagtcccctgtcctgccctgtaggtggaatctataccttggggtctgttctgacgttcacctaacagcctttccaggctcagctgtgctattgtatggaccagggggttgttttgtttttgttgtttgttgattgtgtgtgtgtgtgtgtgtgtgtgtgtgtgtgtgtgtgtgagcctggcgtggttgcgggcgcctataatcccagctgctcaggaggctgaggcaggaggatcactcgagctcaggagtttgaggctgcagagttgatcatgccactggactccatcctgggcgacagagcaagactctgtcttttaaaaaaaaaaacggggctgggcgcggtggctcacgcccgtaatcccaacactttgggaggccgaggcaggcgaatcacgaggtcaggatttcgaggccagcctggccaacatggtgaaaccccgtctctactaaaaatacaaaaattagctgggcatggtggcgggcgcctgtaatcccagctactagggaggctgagccaagagaatggcttgaatccgggaggcggaggcagaggttgcagtgagccgagatcgtgccactgcactccagactgcagccctggtgacagtgcgagactctgtctccaaaaaaaaaaaaaaaacaaacaaaaaacaataaataacaaggtcggctgaggtggctcacgtctgtaatcctagcactttgggaggccgaggcgggtggattacctgagatcaggagtttgagaccagcctgaccagcatggagaaaccccgtttctactaaaaatacaaaattagccaggcgtggtggcgcatgcctgtagtcccagctactcgggaggctgaggcaggagaatcgcttgaacctgggaggcagaggttgcagtgagccgagatcatgccattgcacttgcagcctgggtgacagagcaagactctgtctcaaaaaaaaaaaaaaaaaaagactcaaaaaaaaacaaaaatcagccaggcgtggtggtgtacacctgtagtcccagctactctggaggctgaggcaggagaatcgcttgaacccatgaggcagaggttgcagtgagccgagattgcgccactgcactccagcctggcaacagagcaagactccgtctcatataaagaaataaaacaaaaataaacaaattttaaaaacaaacacattcctatacaggtttctgtgtggacagcgtctgctcttgggtctgcacctgggagtggaattgctgggttgtgtggtaactggatgttcacccataggatgaacgaccacactcttttgcacagtggccgatggttctggtctctctacagcctcaccaactcttatattctttttgattacagccactctagcaggcatgaggtggtacgtcattgtggctttgacctgcatttctctggtgtctaatggtgttgagcattttttcgtgggtgttactgaccatttgtatatcttagagaaatgtctattcagataatttgcctatttttaattgggttcgttgtctttttattgagttgtaatactttattcgggatactagacccttattagacacatgatttgcaaatattttcacccattctttgggatgtcttgttaacctttttgatggtgtcccttgaagcacaaaagtttttaattttgatgaaatctaatttatttttgttgttgttccttgtgcttttggtgtcatagctaaggaacccctgcttaattcaagatcatgaagatttgtgtctatgatttcttaacagttttatagtttatttatatttatataaatatgtttttgagacagggtctcactctgttggcgaggctggtcttgaactcctgacctcaggtgatctgcctggctcagcctcccaaagtgctgggattgcagccgtgagccaccgcgcccggcttgacttcttccttttatatgtgggtatttttctgtcccagcgtcatttgttaaaaagacagtcctttctccgtgtaattgttttggcaccgtgtggaaacccgctgcctgtagccaggagcttctttccagccctcagttctgtcccattgctctgtgtgtctattcttacgtcctcatggcagccttgtagtaagctttgaaattgggaagtgtgagttctccaactttgttcttctttttcaagattgttttggctattctgggaccctcaaatttccatgtgaatttttaggataagcttttcagtttctgcggaggagccaagtgagatgttgataggagttgcgtagaatctgtggatgtgtttggagagtgccgccgtctccgctacattaagtccagatccgtggattgagggtgcctttccatttattttggtcttctttactttctttcaaccaagttttgtagttttcagagtataaattttatacttgttttgttcagcctattactgttttatttttggtgctattgtaaatgaaatcttcttaatttcaatttcagattattcacttaaatatacagaaatacagctgattttgtatattgagcttgtctcctgcaatgttgctgaacttgtttattagggtttttttaagtgaaatccttaggactttttatatacaagatgaggtcacttgtaaagagagatagtttacctcttaatttccaacctggatgcctttaatttcatttccttctctaactgcctggttaaagcttcagtacaatgttgattagaagtgggtatcttaggctgggcgcggtggctaacacctgtaatcccagcactttgggaggccgaggcgggaggatcacgaggtcaggagatcgagaccatcctggctaacaaggtgaaaccccgtctctactaaaaatacaaaaattagccgggcgtggtggcgggcacctgtagtcccagctactcgggaggctgaggcagaagaatggcgtgaacccgggaggcatggtggtgcatgcctatagtcctagctacttgggaggttgaggtgggaggatcatttcagcccagaaaacggaggctgcagtaagccatgatcgtgccactgcactccagcctgggagacagagcaagaccctgtctcaaaaaaagaaaaactgttctgaagcacagtgtagtctagtactgtggcattcccacctgtattcctgcttgttccatttacttgagaaacatttttttcataaataatatgaaaacatatccatcccagtttctgtacattaattccagactaagagcatttaacctgagtttagtggtagatttaaggacactcatgagaaaaacctccatttatacaagaggaacaggacccttccttatctcgaggatgatgtcccgcaggagacgcctgctctcctccagacaggctctagggctgttcatctgacctgccttggaatgtctcacgtggctgcgacgccagcctttcaatcgtctcccatggatgaagccatcgtgggtgtgtctttggtatgtgtctctgttgcttggtctgccctcttttttttgagacggagcctcactctgtcacccaggctggagtgcaatggcccaatctcagctcactgtaacctccgcctcctgggttcaagcgattctcctgcctcagcctcccaagtagctgggattacaggcatgcgccaccacacgcagctaacttttgtgtttttagcagaggcgggggtcttgctctgttgcccaggctggtctcaaactcctaggctcaagcaatctgcccaccttggcctcccaaagtgctgggattacaggtgtgagcgactgcgcctggtccaggaagggaactttaacacataatggataaagctggaccctcaagcaaaataggaatatttaaaatccattgttttggattaactgcagcatctccagattatctttcctccattttaaagttacctacaaagggtccataccttgatggtagcatcagccctccacagcccatctctttctttctttattttatttttatttttttgagacggagtctcgctctgttgcccaggctggagtgcagtggcttgatctcggctcactgcaacctctgcctcctggattcaagcgattctcctgcctcagcctcccggatagctgggattacaggcgtgtgccaccacacctggctaatttttgtatttttagtagagacgggatttcaccatgttggccaggctgctctcaaactcctgacctcggatgatccgcccgtctcggcctcgcaaagtgctgggagtacaggcatgagccaccactcccggccagccagcccatctctttcactgttacaactaacaactcaaatccaggaaaaacaaagcaccccccgcccccgccaccaccgccctgccactgaggactctgcaaagtaaaccagtaaaccaaagctgtggaggtggcccctgtggggaagccgtttcctggttttatcttcccttttctctcgtagctttgccccaggatgggcctcagttacggaactgcacagaaacacggaaagctaaaactcccatagaaaccttgtccttttggcaagagaaattgtgaacaggggccactgaggtccagaaagcgtgtggtgggggaatcccagaagggagcgagtgggagaaagaggccttgggactctgaggaggaaccagcagcagccccggctcccccacccgagctgcacctgtgtggggtgcactcagagaagcaacaggaattggctttgaaagtggaacctcgactggagcagaggcagcagaactttgtggttggaactaaccaggttgatgggcatttaaaaaaaaaaaaaatcaacattctccagcggattgttgcggagtccacccagcataaccgtcaaaatgtccagttcatggccgggcgtggtgcccacagctgtgatcccagcactttgagaggcggaggcgggcaaatcgcttgagcccaggagttcgagaccagcctgggtaacctgacaaaaatcagtttctaccaaaaaatacaaaaataagctgggcgtggtggcatgtgcctgtattcccgctacttgggaggctgaggtggaaggattgcttgagcctggtatgcagaggttgtagtgagctgagattgcaccactgcactccagcctgggtgacagagccagacctggtctcaaaatttttttaaaaagcccaattcataatcccaaattatgtgacatataaaaaatcatgagaatgtgaccagtttccaaaggaaaagtgatacagtttggatatttttcctgcccaaatcccatgttgaattgtaatccccagtgctggaggtggggcctggtaggaggtgactggatcatgggaacgggtctctcatgaatggcttgggccacccccttggtgataagtgaattcttgctctgagtttacatgagatctggtcatttcaaagtgtgtggcacctcttccctgctcctcctctgccttccaccatgattggaagcttcctgaggcctcctcagaagcagatgctgcgatgcttcctgtacagctgtagaaccatgagccagttaaacttatttttcttataaattatccagtcttagatatttctctttttttttttttttttttgaaacagtctcgctctgttgcccgggctggagtgcagtggcctgatctcggctcactgcaagttccacctcctgggttcacgccattctcctgcctcagcctcccaactagctgggattacaggcacctgccaccacgcccagcgaattttttgtatttttagtagagacagggtttcattgtattagccaagatggtctcaatctcctgacctcgtgatccgcccgcctcagcctcccaaagtgctgggattacaggcgtgagccaccgtgcctggttgcttagctatttatagcaattgcacgaatggcctaatacagaaaattggtaccaaggagtaaagcattgctatagatacctgaaaatgtggaagcagctttggacctgggtaatgggcagaggttggaagagtgtggagggctcagaaggagacaggatgatgaggaagaagaatttgatgaggaagaatttggagcttcttagaaactggttaaatgattgtgaccaaaatgttcatagtgttgtggacagtagaggccaggttgacgaggtatcagctggaaatgaggaactgattggaaactggaacaaaggtcatgtgttctttgctaaggttttggcagagagcatggctgtattctgttcatgcctcgggatccatggacatttaaacttgagagtcatgagttagggtatctggtggaagaaatccctaagcagcaaaatgttcaaaaagtggcatggctgcttctaacaaactgtacttagatgagggagcaaaggaatgacttaaagttggaacttatatttaaaagagaagcagagtgtaaaagtttggaaaattggctgggtgtggtggctcacacttgtaatcccagcactttgggaggccaaagcagatagataccgtgacgccaggagttcaagaccagcctggccaacatggcaaaacctcatctctactgttgggaataacgctcaaaatcctaaggtgatcgaacactcaaacaaaggattcttttttgttgttctgttttgtttttgttttcgagatggagtcttgctctgtcacccaggctggagtgcagtggcactatctcggctcactacaagctccacctcctgggttcatacctcagcctcccaagtagatgggactacagacacccgccaccatgcctggctaattttttgtattttcagtagagacagggtttcaccgtgttagccaggatggtcttgatctcctgacctcatgatccgcccacctcagcctcccaaagtgctgggattacaggcgtgagccaccgcgcccagcctcaaacaaaggattcttagcaaagcaattttacttctgcgtagacaggtgcttctccttggccagttgccatgagagcacacctgaacaaaggggcatgagggcctttatttctgatgcaagtcctgtccctgtaccctttccccattggccagggttgggttgcacaaactgaactaatcccagttgggtagacatttgaactttctttagatatggtgggcatgtaagggagagagggaaagaagaaggggaaggagcgtttgcaatgagctagagactagtctcctttccaaataaggaaaggaatgtgagctggtactgataagcctggtcctgtggcgtgtccaggcatctaacaaaggcagaaaagagaaaaaggaaaaaggggtgggggaggtactatgaattaaggaagaaaggattgatcaggctatttgaagagaaacctcatcatatcccacatctactaaaactacaaaaatgagccgggtgtggtggagggcacctgtaatcccagctactcgggaggctgaggcaggaaaatcacttgaacctgggaggcggaggttgcagtgaaccaagatcacaccactgcactccagtctggcgacagaatgagactttgtccgccacgcaaaaaaaaaaaaaaagtttggaaaatgcgcagcctggccatgtggcagagaaaggaaaagctttttcaggagaggaattcaagcagagtgtggaggaaccacttcttagagatatttgcgtgtttgaaaatgagccgagaggtgatgaccaagccaatggaatgatgaccttcatgacagcccctcccatcacaggccctgaggcctaggggaacgaaatggttttgtgggccaggcccagggccccacttccctatacagcctcagggcagtgctccccatatggcatcccagcagctccagctccagcctcagctcacaggggcccaggtacagctcaggctgccactttggaggttgcaagctgtaagccttgacagctttcacatggcattaagcctgtgggtgcacagaatgcaagagtgaaggcttggcagcctctgtctcgatttcagaggatgtatgagaaagcccaagttcccaggcagatgcctgctgcggggggcagagcccccacagagaacctttactagggcagtgccaaggagcaatgtccacaaatccccaaaatcccatctgactaattgagagagttggagcccccacacagagtccccgctggggcactgcctagtggagttgcgagaaggggccactgccctccagaattcagaacggcaaagtcatcagcagcttgcaccctgcggtttcacaagcactcaacaacctgtgagagcagcgttagggatggaacctgcaaagccccgagggcggagctgcccaaggccttgggagcccacccctggcaccagtgtgccctggatgtggagcatggagtcaaaggagattgttttggagctttcagatttaacacctgccctgctgggtttggaacttccatgggacctgtagtccctttcatttggctgatttcttccttttggaatgacagtacttacccagtgcctatattcctattgtgtcttggaagtaaattacttgtattttgttttacagtctcattggtggaagggacatgccttgtctcgggggagactttggacttttgagttaacgctggaatcagttaagattttgggggattcttgggaaggcatgatagtattttgcaatgtaggaaggacgtgagatttgggaggggtcccgggtggaatgatatagtttggatatttgtcctcacccaaatctcatgttgaattgtaatctccagtgttggaggtggggcctggtgggaggtgtttgggtcatgggagcttgggccatcccttggtgataagtgagctgtctctctgagttcacacgagatctggtcatttacaagtgtgtggcacctcccccatccccccacttgctcctgcctttgccatgtgatgtccctcctcctgctttgcctttgaccatgattggaagcctcctggggcctctccagaagcagatgccgctgtgcttcctgtacagcctgctgaaccacgaaccaataagcctttctttataaatgaccccgtctcaggtatttctttatagcagtgcaagaatgacctaatacaaaaagacaatcaacaggccgggagtgatggctcattcctgtaatcccagcactttgggaggctgaggcaggcagatcacttgaggtcaggagttcaagaccagcctggtcaacatggtgaaaccccatctctactaaaaatacaaaaattagtcgggcatggtggcgtgcacctgtaatcccagctactcaggaggctgaggcaggagaatcacttgaacccaggatggggaggttgcagtgagccaagatcacaccactgcactctagcctgggcagcagagccagactgcatctcagaacaaacaagtaaaaggatggggaaaatatatcacagaaaccctaatcaaaagaaagatggagtagttgtgttaatatcaggcaatgtatattcaaaacaaatatcaacagggataatgagagacattactcaataataaaagaaggcaaaacaatccaaattgtgtattcacctaacaatagaatttcaaaacacatgaagcaaaaactaacagaaatgaaaggtaaaacaatttcttacagttagagactttcaccctcctctttcagtattttgttgttgtttttagtcagggtcttgctctgtcacccacgctggagtgcagtggcacaaacatggctcactgaagcttcaacctcctgggctcaagtgatccttctgcctcagcctcccgagcagctgggactataggtacatgccaccacacctagctaattttttttttttttgagacagagtctcgctctgtcgcccaggctggagtgcagtggcgtgatctcggctcactgcaagctccacctcccgggttcacgccattctcctgcctcagcctcctgagtagctgggactacaggtgcccgccacctcacccggctaatttttggtatttttagtagagacatggtttcaccgtgttagccaggatggtctcgatctcctgacctcgtgatccgcccgcctcggcctcccaaagtgctgggattacaggcgtgggccaccgcacccggccactaatttttttatttttgtagagacgggctcttgtcatgttacccaggctggtcttgaactcctgggttcaagtgaacctcctgctttggcctcccaaaatgctgcgattacaggcatagtctactgttcctggcccctctttcagtaattgagagaataaatagaaaatcatgaaggatataggacacctgaacactgttaactggtttgactcagctgacatttatagaacattccacccagcaacagcagaatacacattctattcaagtgcatattggacatttaccaagacatatcatgttctggaccatgaaataaaccttaactaatttaaaggaattgaactcacacaaagcatgttctctgaccataatatcaatccaaaagccagtaacaaagagctatctggaaaatccacaaatattaaattaacctgtgagttaaatagaaaatcacaagggaatttagaggctgtttctaactgaaagaaaatgaaaactaaacatattaacatttatggattcttgctaaaacagtgtttagaggaaaacttagaatattaaatgcttatgttaaggtagaagaaaagtctgaaatcagttagctaaactttcaccttaattaattcaaaaaagaagagcagatccaaagcaagcaggagaaaagaaacaatagtgagtggacatcagcagaaatgaaaacagaacatcagagaaaaatcagtgaaagcaaaaactggttatttgaaaatatcaataaatttgaaaagcttcaagctagagtgatcaggaaaaaaagagaagatacaaattacaacattagcaatgaaagtgggaacaccaccccagaccctatagacatgaaaaagatattaaggaaatattacagctgggcacggtggctcacgcctgtgatcctagcactttgggaggtcgaggcgggtggatcacaaggtcaggagtttgagaccagcctggccaaaatagtgaaatgccatctcttctaaaaatacaaaaaaaatagccaggcatggtggcagacacctgtaatcccacttacttgggaggctgaggcagaagaatcacttgaacacaggacgtggagattgcagtgagccacgatcacgccattgtactccagcccgggtgacagagtgagactccatctcaaaaaaaaaaaaaaaaagaaagaaagaaaaaagtaaatatgaaatattacaaacagttttatgctcataaatttgacaatttagatttaatgggaaaattccttgaaagactcaaactgccaaagttcactcaagattaaataggtaaaccaaattgtcatatgtctattaaatgctaccaaacatttaaggaagacttaataccaattctacacaaactcttaaagaaaatagaagaggagagaacactttgcaattccttttatgagttcaacattaccttgaccctaagaccacataaggccattacaagaaaagcaaacagaccaatatcccatatgaacctagatgcaaaatcctcaactcattattagcaaataatccagcaatatataaaaatgagtctttatcctgaagtaatctatttattctgggacaaacaaaatgaggtttatcctggaaatgcaaggttggttcaaccttcaaacatcagtatcattcatcgtatcaacagactacaaaaaaaagaatcttatgatatctcaatagatgcaggaaaagaatttgacaaaattcaacatccgtttgtgataaaaactcttagcaaactatgaataaaaaacaacttccttaacttttcagaaggcatcacaaaaaccctacagataacatcacacttaatgataaaagattggatgctttccccataaggaaggaaacaaggcaagggcgtctgctgtcaccacatctattcagcatcatactggaggccccgttcagtgtaataagcaagaaaataataaaatgaacacatattgggaaggaataaatacacaactgtctctatttgtggacagcatgactacatagaaaatctcaaaggagtctactagaacaaattagaacatcacagaatactaggtcagtgtacaaaatgaaatgtgtatttctatttgctagcaaggaacaattggaaactgaaattaacattttatttatttttattgacttacatttttagagacagagtcttcctctgttgcccaggctgagtgcagcggcatgatcacagctcactgcagcctcaaactcctgggtacacgtgatcctttggcctcagcctcctaagtacaggtatgtgccacaatggccagctaatatctttttttagaaacagggtctcactatgctgcccaggctggtcttgaactcctgggctcaagcgatcttcctgccttggcctgccaaagtgctaggattatggatgtgaaccactgcacccagcctattttatttttatttttttagagatagggtcttgctctgttgcccaggccggagtgcagtcatgcaaccatagctcatggtaacctcaaactcctgggctcaagtgatcctcctgccccggcctcctgagtaagtgagactacaggcatgcaccgccatgctcagtgcatgccttttttttttttttctttaaggtgaggtctccccgtgtttcctaggctgatctggaactcctgggctcaagtgaccctcccactttggcctcctaaagtgctaggattataggcatgagccactgtgcgtggcctgaaattaacattttaaacatggggaaacagacttctacttccaagtaggatggagtgcagcagatcaaggctcccactaagaactagaaaggccaggcaaaaatataaaaatcatctctttaatggcatcagaaagctacagaagcaacaaagactaaaggggttaagcctcaaaagaggagggttccgtaggataagcagaccatctgcagcccgcagttcccaagtgcttgttcgtgctgggattaatgacacacgggagattcgaagggcagctaatcttggcaagaatgaagacgcgaaagctgatctcttcttcaagactgtggcaggactggaagctgcgtgaaaacgctggttgaagagctaatttgaaacttccggaaggcagagcagaattgtttacctcgctcagggctaaggaaggggagggctctagttgtccacagcaaactgtctgttaatttcctggaggattagttcctagaaacaagcaacacagagataggctcaccgaaagggcagcttgtcctcagctcagctcagtccctgattggagcgaggaggtcaccctccttaccgaggaaatgggggaccctctccgccggctggaacacagcgtcatccagagcaggctctgcccatcttttccttagccgggtagtagaagtggcctctgcctactgaaccgtgctgctgtagggcacacgcagccacagagcatctgtgaacaaatgggcatgggtgtgtttcaatacgctgcgttcacaaaagcaggcggctgccccccgctgcagtttgctgaccccggatctggagtctccaggcttcagcgcatgacatccagcattcagagaccacagggccaaaaatcaagaggaaaaatagcccgtggaaacggatgcacacaaagccagagagtggaagtcgcagcagagaacccctgaactctctgtgagtttttgtttagagttcgaactctgtgcgtttttgtttagatggaggaagcaagggagaaagtagatgaaaaggtggagatttttcagctgagaactggaatccatataacacaaaactttttttttttttgagacggagtttcactcttgttgcccaggctggagtgcaatggcgcaatcttggctcaccgcaacctccgcctcccaggttcaatcgattctcctgcctcagcctccctagtagctgggatgacaggcatgcgccaccatgcctggctaattttgtatttttagtagagacggggtttctccatgttggtcaggctggtctcgaatccccgacctcaggtgatccgcccgcctcagcctcccaaagtgctgggattacaggtgtgaggcaccgctcccggcttataacacaaaacatttaagaatctgcaaaccccaagttttcctgccatggcaggtctgagcacaaggcagccgggagaggtttaatcctgggtgagtcaggccgagttccagttatcacactgagaatcacccagtaaatgaagctgctgtgaccaaagtgaccaaaggctgtttagtacctgaaggtcttgggaggccctggacctcatggagagagaaccatagagcgtggggaggtgggggcagaggccccctggggctgagcctgttctgagcagttcacgggggtctccttttttatccttctcctgtgtgcctgcctggggggcttactgtcagctagtgtgtgggggcaaagggcagacaggtccacacaggtgttcagcctcttgcacagccctggggaagcggggatcttagattctcaccccactccggggaggcgggagctctgtatcacatggtcacttctgcccagcggggccagtggctggagctcagcgaggggacttgggtgcaggctgctgtggagggactgaggacccaggtctttatccttggggcaatggatgtcagcacagggctgccgcaggggacttcagtcagatctgtacttggaaaacctcactgagtatggagacgggtttggacaggccaagggcttctggggatcaggtaaggggccttttcccaggtccggggtggaggggtccggggcccggaggtgggtagacagattcaggagctcaaagttgacaagacatgggggctaggctgggggtcaggggaggagagtgaaggaagaggaaacagaaagggtaacaccaaggttcccagctgtatgtgtggggatacggagggaccatggcccgaggctgcgacctggcagggggtctgcttggcgactgtcaggtaggcggttggagccacagatctggaggttagcgaagaggtctggacaatacatattagtggctgggcacggtggctcacgcctgaaatcccagcactttgggaggccgaggcagaaggatcgcttgagcccaggaattcaagaccagtctgggcaacatagcaagaccctatctctagaaaaaaacttttaaaaaaattagttgggcatggtggtgcacgcctgtagtctcagctactcagaaggcttaggcgagaggattgcttgagccccggaggttgaggctgcagtgagaccagatcacgcttgggtgacagaacaagcaagaccctgtctccaaaaaaaaaaaaaagagagaaatacgcatatgagagccatctgagtctacaggggagagtgctaagctccaccctacctgtgccagggcccacggctcctgttgagaaatggccttaggaggcctggggcttactgagaggggcaagctcgtctaggagatccaaagtttaaggacatcacctgaaagcagtgtgtgctcgcgggcactcaggcgcccgtctgcggtgcaatcgtggacaggatagcctgggctccaccgtgcttggttaaaggggccgaaggaggccccaggaggtcagctcagggggttccagcttgcccctcctggggggggtggtcttcgttgaggtttggtggagatgctcctggaggtgcacctttgctccacagctgaggctgggcctcacgttgggagcagccggcagcattgagagctgcatttggggggcggggaggcagtaacagcagccacacccaggggcagagccagctgcaccccagccagcacagggcctgcggttggactaaaggctggtccttgggccaggctggctccggtgtttcccttcagctctcaggttctctccagcctttccggaaacctactcatctcccagtttcctgccaagaaaccccattactactgaagtctcagactctcgactgccaggcctggtgggtgaagctgcctccagccgggaagaggccttggaggcgccgggagggcccagcttccccgtgcccggccgcgtggccttgggaaagcccctcagtgctccgggcctccgtgtccctttccacaccatgaggctcctggcatttctcctgtggcctgtggggtgtcactggggcaggagtgggccggctccctggctcccggccaccacccctcagcatggtctgcttggcagccagggacagtctgggcttccacccaaagcgtctgcagggagcaggtggggacgtccatccactgtgctgtgtccaaccgcgtctgtcgtgtttctccacggagagcaccgggcagtcgagggggtgcagggactgcggggcctccctacagacacagtctgggtgcctggcagctcagggacctcctttcacaccctctaccacctgcagatgccccccacatgtgtctgtcctcgctgcttctgaaactccccttgggccaaaaggtgcccctgggttgggtccagggaggccccatgtagctgaaggagctgagatttgggccaaaaacctgcaaggggaaggcaggtgtagggtgtggactccacggcgtcctccaggctcacttccccgatggaaactgaatgggagaactgacatttctgggagaattccggctcctttgaaaaaggcggcacgcagaagacgctcaacaccatcgccaccaggaaatgcaagtcaaaaccaccaggaggctgggcgcagtggctcacgtctgtattcccagcactttgggaggccgaggtgggtggatcacctgaggtcaggagttcaagaccagcctagccaacatggtgaaactccatctctactaaaaatacaaaaattagccgggcatggtggtgggcacctataatcccagctactctggaggctgaggtataagaatcgcttgaacccaggaggcagaggttgcagtgagccaagatcgcagtactgcactccagcgtgggcgacagagcgagactctgtctgaaaaacaaacaaacaaaaccaccaggagatctgcctcacaccttcaggatggctagaattaaaaaaacaaaaacaaaaaacagaaaaccagtgtggtgaagctgtgaggaactgtaccctggctggcagggaggtaaaatgctgcagccgctgtggaaaccagtttgacagtttcccaaaaagctaaacatggaatttccataagaaccagcaactccactcctaggtacagacccaagcaagtatccatccactgccaaattgagaaaccaaatgtcagacatccctcccatggggagctatccagccatcaacaggcgggaagttctgatacaggccacagcgtggatgaacccaaggacatcatgctcagtggaagaagccacatactgtgtggttccagtcccacgaaatgtccaatgggccagtgcccaaggacagatgcaggggagggaccaccagggcgggagagggaccaccagggcgggggagggaccaccagggcgggggaggggccaccagggcgggggagaggccaccagggcgggggaggggccaccagggcgggggagaggccaccagggcgggggaggggccaccagggcgggggagaggccaccagggcgggggaggggccaccagggcgggggaggggccactagggccagggaagagccagtgattgccagtggctggggtttccttttggggtgatgaaaatgttttgggggccgggcacggtggctcatgtctgtaatcccagaactttgggaagctgaggcgggtggatcacctgaggtcaggagttcgagaccagcctggccaacgtcgcgaaaccctgtctctgctaaaaatacaaaaattagtgggcgtgacggcaggcacctgtaatcccagctactcgggaggctgaggcaggagaatcgcttgaacccaggaggtggaggttgcagggagccaagatcgcgccactgcactccagcctgggcgacagagcaagactccatctcaaaaaatgttttggaacaaggtggagttgccactgtacatcatgaatgtgctgaatggcaccacattggactgaacagaacactttaaaatgggtaattttatgttatgtgaattttacctcaatttaagaaaaagatgtcgtagggccgtttgaaaggcacatcagaaggagcgaatttcctgcagggctgagcctcccagggcggccacaccttccccacacgttccctcggcaggttccaggcggaacacaccgctcgtctgcaggcgcttggtggtggagctgtttcacacgcgggagcttctcttccccgcgccagcccaggaggagggtgtcactcctcccttccaaagaccagcgacaggacaggagaagcttctgtgactttgccgggatcagagagagtccaggattccagcctagtcctatcaaccctgtatcttggtgctccacctgccaaccacccagatgcaggggccagcacaggacggccactatccgagtctgtgacctctcccttgtccctgatgtcacaccccacttgctgtggcctctctatgctggtctccacaatgctcagccgtcttcgtctgggacactgcaccccttccgccgcgcagcccaccagctaccactcccaggctgtccaccaggtggcagtgaaggtcaccgatgtcaagttcgtggctcaccctcccagccctgcacccaccctggctgcagcagagtggtgggggcccaaggagccctccaacctcgtcaggccagggggctgggatgccagggaccacttctcctgcacagcaaagcttattataaaatccaaatgcggctgggcgtggtggctcacgcctgtaatcccagcactttgggaggccgagttgggcagatcgcctggggtcaggagttcaagaccagcctggccaacatggtgaaacgccgcctctactaaaaatacaaaaattagctgtgtgtggtggcgggcacctgtaatcccagctacttgggaggccgaggcaggggaatcgcttgaacctgggaggcaaaggttgcagtgagccaagatcgtgccactgcattctagcgtgggcgacagagcaagactgtctctcaaaataaataaataaataaaaatatataaaacccaaatgcagccaacaccgtggctcatgcctgtaatcccagcatgatgggaggccaaggaaggcagatcacttaagtccaggagtttgagaccagcctgggcaacatagcgagaccccatctctacaaaaacacaaaacctagccaggcgtggtggcgcgcatctgtagtcccaactactcaggagactgaggtgggaagatcccttgaacccaagagttcaaggctacagtgatccaagatctaaccactgtcctctagcctgagcgacagagagagagcctgtctcaaaacaaacaactccggccgggtgcagtggctcatgcctgtaatcccagcactctgggaggccgaggcgggcggatcacgaggtcaggagatcaagaccatcctggctcacatggtgaaaccccgtctctactaaaaatacaaaaaaattagccaggcatggtggcaggcgcctgtagtcccagctactcaggaggctgaggcaggagaatcgcttgaacccgggagacagagtttgcagtgagccaagatcgtgccactgcactccagcctgggcgacagagcaagaccccgtctcaaaacaaaacaaaacaaaaaacacaacaaaaaaactccaaatgcacctgagtcccaagtccagtctcccaggcttgacgcaacaagggcagggccccttccagccaagctaacccagcctctcctccagcacctccagccttttggagaccctgccctgcccaaaaccacttggaaatcaccaactcaactttccttggaacgcaccagggcactccaatgacgccgtgtcctagctggagtgcctcggcttttgcaatcctgtgcagaatcaaggttttcccttgagccaaagaatgaagaattacggctgaatccaacaccactggctccagggcctctgaaagccgagtcctgaggccgcacaaaggactctgttggctcctgcagccgcagagaaaatctcaaaatctgagtgagaattagcggcagattccagggatcagcagccagctcttcacaccagcctcgtctctgggcattggagccacgccggcaaaggtcacgtgcagccagttggacgaggggtaaaatgccacccgaatctgtttagagtaattgttttcccccagtggatggaatattcttttcatctgggcagctaggaaacagctaaagttttccatgaacctctacaaagatttctgtgtcttccaactttgtgagaagaaaaagaacttgctgggggaaatgatattctcgagcttaacactcaaatcatgttttctcgaaatcatgttactttctggccaagtatgccggcgaagccactgagacacgctccgcacatctttagaacataaaggccctggcagtagcttgcggcgctctttggaaaactgcttggctctcactggaaacacagccacgcctcctctgggccccggtagctctggcgttaagtcggctggagactggcttggccacggccgccatctctagccagccctggggcaactgcccccggctgcgtcccaccctgcccgcctcctagcccctagccagaggcagctgtgtggctccgtggctgggctggggcgctgcggctctgcgcacgataagccagggagctccttccttagcactactggctccaggagcacctatttaggtaaactccattcctgcaggtgtcctccccgctacacatccagcctggcccctcggccagttttgccttcaccctgtgcagttcatcaagacatccccctttcatcaaagctcttctagcacattctgaggcgagccatagagggacatgagggtagttacgtctcatcaaagagaaagggacctcatatttctggagcacctaccatgcacacgggctgactgtgggctcccatggccggtgggacaaagggccccagctgctgtgtggtctgatgctgtgcaaatgaacatctgtgcgagtggccacgcttccccatcggagcagccctgtcgggtcagcgcggccagaaagctgcgttgcacttcccctgttagggtctaaggtggaagaccccttccagatgtccttggtttctagatggacaagaagaaatagcgtgtggctctcaggttaggagaaggaagcagagtgccaggaagagccgggaaggaggaggcaccagggcacctgaggctgtcactgttctacctccgggggtacacgtctggaccactcatgacaggccccactgcatcacgaccccagacaggagacggcagggcagcctcagactcccctgcctaagttcaactccgagcaccggggcaggcgtgcttcctgcatgtcactggggaggccatgctctctctcgtgtatctggactcacgacgtccacccggctcgtctgtattccgtctgggtggacgtgacactgggctgctccactgggaaaacactgaccagtcatcggaatgtttacggagacagtgtcaggcagcgggccagggaaactctgtcctcgaagtcccccaccctctaggcacctaagtggggttttataggatctgctgcaagaagataaagtgagattttagggctgaagacaacatttcaaaatctggctttaaataaacatggaataaaagagagagagagagagcgcgagcaagagtgagagcgcggagcctccagcagctgaaattagaagcagccagccccgggcagggaagccatctgcgcggcgcccagcagcatggagacgtctgggtcctccctgacggcatgcgaagcggcacccgcaggtacagctctgctgtctcctgtctgcagggacctgcgggaacacactgaggtcttgttttccaggtgtcctccaatttcagattctgaagaacagattccctccgctcccatccagaaatacctttcagatcactttcaaggcagtttaagtcatttaagaagcagagtgataagaaaacaaagacaacgtttcaggcggtaaatgaagactaattatactgagcgttaagcaaagttcgtctttcttcgtctttgctcagggaggttgagccgagtacggcccccagtgccaggaggggccagtgctcagtgtcctcacacaggtccgtcttcctgctcacccagtcactggccactctcaccccatgctgggttcagaagatggcgagtgggcctgggactggggcgggctcccactcctgcccggggtggtgctgcgttgtgggcacccgtgtccctcctccccctccaccctgcccagctccagacgtgtggctgaagcggccagctcggccagtttgtcccggcgccacatgtgtccttcctccggccccagaccccagcctcacctgggccagtgcaggagagcccagctacgctgggtgcgcttcaggctgtcacctgcccgagttatttaaatccacattgtcagctaatgtattctaataagcaagtgggtgaccgggctggcaggctccggatgacgctgacatatagcaagggggggaggagcacggagcgaaactctgagactcacttgcgccccggtgctcacccccgcactgcctcccacaggcacctggagtcacgccacgcgatgtgagctggattatataagggggcttgttgctggggaacctctccccgcccacccccgccagggcaggctctggagggaggccacatgtcgtctgtccccaccaccctcagaaggaagcccctctggcctttctggcctggtctgtagggaagctctgtctgtaggccgcctcactttgagggctgaggctggaccacggcaacacagggtcaggaagggcccgagaggccatgcccacactcctctgcccatgtgttgctcagagcaggcagggtctccctgccttagagacagtggcctcatcctgtcctccagaacttcctccccatcacgggccacgtactctctgcgagaggagagaggggacatcagatgcccggatgggcagcaatgcatctccctggctatggccagaagtctggccaacactatggctgcaggacagccatgagccacgctgggttgtgggcagcaaacccaaggcaccatctgccaaggaggccaggtgagaaccacgtctggggtggcagaagggctgagccgtcagcaggaccctcgcgcctcacagccccagctccactgcgggcagtccagccgcagccacagacgggggagggggcgaggtggggggcgggcccacgtgcctgtcctcgggataaggggccactccacagggtgctggccccctggggctctctgtgatcagcagcagcagaccacaggggcaacagctccatccactgaccccaaggtggacagagtggggacctgggggccaggacgagattccagggtgaggcacaggtgacgccttcggactcctgcaggtaaaactggaggcctgtgcaagatcactgcccattcccatgacaaccttaactctagcacatttttcattcatgcaattgttacaaagataccgccacccccccatccccccagcccagttttccctttggtgacatcttgcatcagtacatgtgtttatgatgatcaatgaatcaatgctgctacattattattaactaaagcccatactttattcatatttcctcagtttccctccaatgtcttctttctctcccaggaccccacccaggatcccacgtgacatttagggatcagctgtctccaggttcctctaggctgtgacagtttctcagactttgcttggttgttttttggtttttggttttttttattttgagacagagtctcattctgtcacccaggccagaatgcagtggcatgatctcagctcactgcaacccccgcctcctgggttcaagcaattctcctgcctcagcctcccgagtagctgggactacaggcgcctgccaccacgcccggctaatttttgtatttttagagatgagatttcaccatgttggctaggctggtctcaaactcctgaccttgtgatctgcccgcctcagccttccaaagtgctgggattaaggtgtgagccaccgcgcccagcccactttccttggttttgatgacttgggaagttttcaggagggctggtcggtttttctgtagagtgtccccctgttgggatttgcctaatgtttcttttcttttcttttcgagacagggtcttggtttgtcgccaaggctggagtgcagtggtgtgatcacagctcactgcagccttgacctcctgggctccagtgatcctcccacctcagcctctagtggctaggaccacaggcatgtgccatcacgcctggctaattaaaaaaaaaatttttttgtagagatggggtctcactatgttgcccagactgctcttgaacaatcttcccacctcggcctcccaaaatgctgcgattacaggtgtaagccactgcgcccggtctgccagtgtttttctaatactaagacaagggttatgggtctgggaggaagagcccagtggtgaagcgccctgtcacatctgcccgtgtgacctctcggtgatggtgccagccttgacctctgggctgagacagtgggtcgggctctccactgtggagacgccttgcctacctcccactctgtgctctctggaaggaagtcaccatgtgcagcccacacagaaggggcacgagctggggccccctccctgtgccccttacttttatttattttgagacgaagtttcgcttgtcgcccaggctggagtgcaatggcacaatctcggctcactgcaacctctacttcctgggttcaagcgatcctcctacctcagcctcctgagtagctgggattacaggtgcccaccaccatgcctggctaattttttgtattttcagcagagatgcggtttcaccatgttggccaggctggttttgaactcctgaccccagttgatccgcccgcctcagcctcccaaagtgttgtgattacaggcgtgagccactgtgcccggccgggccccttccttttaaatgtcagcctctggagtgaccatctgtgttgactgggagctcttcggaatgtcccatccagttgctgaggctaatgatcacctctcaggtgcgctggtcccattctctgcgctgtttatgtcactttatgcctggactcctcccaacaatgttctgtcctccacttagagggtgctcagagaggctgtgacacctgcccccagcaaccagccagtcatctagcccagtggcccccgggcccgcctatgccaaatgatgccccctcggtgccgcccacccctaaatgcacaccatgcctgcagacgtcagcactcgccctgtcccacttgccctggtgggaaacagcctgcagtgaaaacgtcgctctgccttttatgctggacaaagccgaagtgtgctggaggtggctgagccaggcttcccgcggcaaggagcgggactcctgaccccacagccctggctcccaccctcgatgtgctcctgcctttgccttcttgctggtaacgctgccattggtgctggtaacgctgccattggtgaagaacacgggagcccatccagcccatccaggaagcaaagaaacggtgctccagacaccatgcggatagcttcacccgccgaccccggccaggcccagctgctcccacagcacctggcatggagggggaagtgagcaagggcaggcggggagagaagaggctcgccctcctggctctgccccagacacccgtccgatagcactccagtgccttccggtctctcccgctctggaactttctggttactgattacaagtgctttaatccaggaatgaaaaggaagaggagttctgattgggtggacccttctcttggagagaaggcaaagctgccaggcagaatctggtgggagggggaggaagaggagagaggaagctcccttgacaggcataaaacgtccctgtgattgcagacaagtggctactctcaggccacattcagccgaggctgggtgaggctggtcgggaagagggagacggaggtggaagcgggttcaagttttgacgggtggtcacctcagaaagggctccttctgtttagcaaaactccccaatccttcgcctggcttgccaggagaacagcttgcttgaaaagcaaaggctgtcatcctgtaattaaatctgagacccccccccatgtgacgttgagatgaagccacttacataacgcgactaaaaataagctgatgaaggctgcacacttacactctctgcctccagccctcctctccccagcggcccatcgtgctggctgacccagggtccgcgtcaccggctgtggcgtcgggttcctgtctgaagtcactcttgcctccggccccgctcggcgccctgtgtgcatgagggcccatcgctggtgcccgggctgcagacccctggctcagagctggggtgctgaggatcccccagcccgcccaggcgagggttgacgcttatgagaggagacctgctgggtaccagctccatctgcctccttctcagtgactcctgacgagctgctcatttacacacacctgctcccacccccaccccacagtctgtgcgaaacctaccgcaccccacccccagtgcaggaagaaggtgaccctggtctggggtggggacagagagtctgggagggggtggtggctggcagtctcggtggctggcgacgcctcttccgctcttccttcctgggaggaggcgggcaaggcgaagcctctccgctcagtcgatggtttccttcaggacgtctcatagaggtgtgggtgagatcccaggtctgggccgcaatttctagccacgctgcccaaccttcaggcaagcagtcaggttccacagctaccccaccacactctcagagtcgaggggaacaagaagagggagtggtctgtaaatgcgtcgggacaagagtgccctcctaactccacctggagctggcgtcagggcgatctctggatgcccagcccataagcctggcctgtctcttcctgggacccttggtactcagcacccccagccccccagccccctaataccctttagaaaggcttccccatcagtgtgaaagacctcacaggacgctggtgaaggcgagcacagagtgcctggggaacatccttggtggagaacttcctggaggccactggtgcagggcagatgccaggcgggcaccgagtttcttgcccttgttctgcattcctaggtatgaggacctcaccacgtcctgctctgcgcctgtcatcggccgcggtgtgtctcctcaggtgccgagctggtcacttccatgtacagcatggataaccgtcttctcagggaaggcctccagcccgcattcagccacctgcccagccgccgggcggagggagcaggctcaggcaccgagactgctgagccactggccacccgggaagcaggctgcgttctgagtcggtcaccgaatatgtccccccttggacgggagtagcgcaacgatgtgcaggccagcccaggaagtaacgctgggagcttctagaaggtggagcgggatccaggaccgtgggagcttttccggagaagcctacctctcctgtgttgcagctgatgggagcagcagggcctggagaagaactgtccccaggctgactcccctcttggagtgaggaggcctcccgtgtttgcctgccagcctccatctgtcatcttggttccagccattcaactttcctccaggagagcagagctgctctacccccacctgctccg

SEQ ID NO: 302 - DNA, 493 bp, Homo sapiens
  misc_feature (20)..(20): n is a, c, g or t.
  misc_feature (30)..(30): n is a, c, g or t.
  misc_feature (318)..(318): n is a, c, g or t.
  misc_feature (428)..(428): n is a, c, g or t.
  misc_feature (440)..(440): n is a, c, g or t.
  misc_feature (461)..(461): n is a, c, g or t.
  misc_feature (488)..(488): n is a, c, g or t.
tttttttttttgagacgganttgcccctgntcgcccaagctggagtgcagtaaataatttgggacatagttaaattgtcagacacagaaaacaagtaaccaaacctatagataacgaaaaactggcttcccaacttcagttctcaaggtatggttactaagtaaacatacagaaatttctcataattttcaattttcattgttccagctttactcgtgaacaaatgctaaatcagacatgaactgttatataggctacaggataagactctaaaaaagaaaactaaaattttgtaaaatgttagggctgtttcaggantatagggaagttttcctcttacctacttacaaacatgggtctattaggcggggacacaggaatctagggttattatcagtttgggtattgtgatatagggcaccgttccnttgtaggttccnccgtctgccgcgggggagttngttaaacgcctgggggggaggcttcantgttt

SEQ ID NO: 303 - DNA, 439 bp, Homo sapiens
  misc_feature (380)..(380): n is a, c, g or t.
  misc_feature (402)..(402): n is a, c, g or t.
ttttttttttttagagtaaagtctatattgttgtaatacagaagtgaaggtgagtgggagggaacaatataatgaagaaacccaagtcagatggaacaggttaaacatgaaggtgaattcagagtaccttccctcaaaccccacccacacccctgctgctgttcctgagtatgacctgagttcagggctgcagcttcttcacagacagctacaggaacaaggtctacctaggaaaaaaaaagaggtgggtgccctggtgcatctgtaggcactgggaaatgactatcttgtaggaggccattaggattagggaagatagggaattaggaggctgggaggaggaagtgtttcagtttttgaacttcccctggaacactttncccttgaaggggaggacccctngggtctttttccaggccttccctaggagaggacccct

SEQ ID NO: 304 - DNA, 370 bp, Homo sapiens
  misc_feature (138)..(138): n is a, c, g or t.
  misc_feature (255)..(255): n is a, c, g or t.
  misc_feature (265)..(265): n is a, c, g or t.
  misc_feature (282)..(282): n is a, c, g or t.
acttgtttgaggtgatttaggattaccaactctgggaaaaaatattcacagccacattataaaaaacattatcggcaggattcatctcctgctcctttagaataagaacttttcttttgtttgtggaactttggaatntacaagcaagacgttcattcatgctttaaaatgctgtttaacaattgcttagcactttaccagggagaatgtttctcctgagtgtttaccaccctattctgtaatacagttgagggnccacatcaangctatctattccttccngggcccagaggaacacacacatttaatctgaggtgcattgaggtaccacaggctgagtgggaggaaagggattaggggagggcaatta

SEQ ID NO: 305 - DNA, 31737 bp, Homo sapiens
gatcaagataccagcatgtaatgagggccttctgttgcactctcagatagcattagtttaaatggcaagagaaaggcagaactctatttgagagggctgttgcaaccttacagcatgatacatcttgtgaaatatggttttgaacatttttattaaaaatgtaggcatcaaaatctctaccatttgtgtcatgttataataataactataaaactgcattattcagaatatgtaacaataaaaattaatattaaaaagttttaaaatgtatttgcttttgcatatatcgtttctattgatcataacaaccagatgtgataaccagggccagatatttctactgttatcattagaaatcaaagaaaactaacatattggatggttttaaaaattataaaaattgtaagtgtacatataaatattaacttgtaagtcatcttgcaagtattataatcagatttcattttcaaatcgtgatgaatctaacatgatacctaagtttgtatattgaacaatgtgtatacatgtgcacacacttttaatttatatttttctcattctgagtgataatgcagcaaaatttaaagagattacactataattatgtttaaaatcttacttgtacttttgaaacaaatcacaggttgagtcatgataacaggacaaaatatacttagctgctgaatataaacaaagtatacagaagcgtaaatcttgcgagcacaaaagtgttaaaaacagcaagatctagaggctcaagtacaagagagatatattataccaagagcagtaatctcaaaaatttatatcccaaatgtgtagacttgatcttattttcagtcagtgtgttctgtatggaagatgaacatgctcctgacaacggagtatgatttagaaaactatatcctgcacagagggatataaaatgtgattatatactgcacttctgtgcaaaattttaaacagaatttaatcaatcactttgaaacctagatgtatttgtggaacaatgacatcactttgaaattatgtgtagtttgtaaatgcacaaaattaataatgtattttgtgtaaatggattactttggaaagaaactcataagaactacattatcagacaaaacattctttgaaaatgtgtgtgctacaaggcaatttgccatttcattttaatagaatgttccatgctgaaaatgtctaactgctcggaagtggaataggagtgtaaatttattatctgagaaaagaaaattaattgacacaggccaaaaatgtaatggaattagacccatgtgccttagtgagaacttaggaactcgatctgggctctatggagtgacaaaattatgcaaaaaaaaaatgaagtatgtcatttttgcacaaagctcaggatttctcaaaggaatattacataaaataatgaagtctcctttatctccaagacagtccagtcttagaacgcaatggaacatgccatttgaaataaaaaacaaattttgtttttgttttgttttgttatgtttggtgctattttaagtatttaacattcataaagagagaattagcaattaatgagataaagtttaaaaaaaatcgagatcaggacaaggtaaaaaaaaatcattcagtcttgcaaatctgttatttaataggtcatgttttaagaactgggaatacagatactacgtgtattttaaatagaaaatttgaaatgtacaagaagtcatttttaaatatagtcactctgctataaagtcaatctctaaaactcaatctttgtgtctaactgaaactgtaccctgtgaacaacatctccccattccctatcccttgcctccagcattaactagcattctactctctacttttaagggtttgccttttttcgattgctaaaaagtctattttcagtgttctcacaacaaaaagataaatatgtgacataagagatgtgttaagcagcttgatttaatcattccacaatataaatatatacgaagacataatactgtacccctcaaaacaattattatttgtttatttaaaacatttaaaaacaaaaaatgagacaaatatcaggaaagtaattttatacataagctagataattgcctatagctgcgtatgctgtgaaataatttctgtttgaaaagacaggaaaaattatatggcaaaaccatagtgcagtaataaatttgccatgtttagtaaacaaaatatagttcaatgtgactgaagcataccaagaggcagaagaatgtggtgtacactgtagtgtagaggagtgtcttagtttgggctgctatacaaaataccatagattgagtggcttacaaataacaaaaaaagtatttcttactgttctaggggttggaagtccaaagtcagagtgccaggatgttctggttttggggagggcccttttgcggttgcagactgttgggtttttgtataagcacatggggaaagaagtgagagctctcttaggtcccttttataagaacactaagcctattcatgaggcctctactatcacaacctaattacctcctgaaggtcccactactaataccattacattgacagttacgatttcaatatacagattttgagggtacactttaaaaattcagtccgtaacattctgccccaggttccccaaaattcatgtcttcacatgcaaaatgcagtcattccattccaacaaatccacaaatcttaactcattccagcctcaagtccagtctaaagtccaaggtcttatttaaatattacctaaatcagatgcaggtgagcttcacggtacagttcattctcacaaaatttctcttcatctgtgaacctgtggaatcaaacaacatgaactttcaaaatacaatggtgagacaggcataggataaacattcccattccaaaaagaaccactattcgaaaaaaataaaatatatgaatgctggatcccaagtaaatctaaaacctaacagggcaaactccatcaaaccctaaggttcaagaagcatcctctttggcttgatgactcaccttccagacagtccccgacagctcagtgaggcactgctcgctgctgactctatgcactggacccacttatggcacagtcttttgtcagggctgatgtcactcacccagggcttcactggatggccctcccacacagctcctctgagcatcatttctgtcctttgaaatcaaaatggaggcaaccttggcccaccttgccataccctctggatttttggtaaaagcagcagctgtaattgtctccaaatcccctttgcgccccttcttccgtaattttgaaggagagaatagcacacatccacaactgaatagctctcgggtccgggcctgtagggcttaagcattccgaatgtcttcctttatttcgtcccattatctctgtttcctttagtcccaactggcagtgtttctcctggtataatcccatttctagtcatggtttgtgttgagatgtttgattaagcctgtggttcacacccatattaatcaaatcagtaagggtccgaaacactcttcatgttctcttcagaacacactttctcactttttttgcaatatggacaggctgagaatttcccagatcttaaattatggttactttttccttaacaattccatcttcaaacctttttctttttctacatttgactctacggattcagaaggaaccaagctgctgcttctacatgttgctgagaaatctgctgggttaaatgtccaatttcactgcacacaagttccaccttccgcaaaacacaagagcatgaatacaattcaaagaagtttgtttccacttttcaacatggattgcttttgctccattttccaataacattttcatttccatttgagactccaacagaatgacctttactgtccatattttatcaatattctgttcatgattatttaattattttctgagaagacagcgttttcttctatatttctttccgagccctcacgagaattggcttttaaatttcttccacagtaatctagcattttgcataaaacctcatcaatctctgccaatcactgagcccaaagccattttcactttgttttaggtatttataataacagcactcccacttctcatgatcaatttccaccttcagcggttcaggctgctttaataaagttccataacctgagtggcttttaaataacggaatgcacatctcacagttctggaggctggaagtctaacagcagagtgccagcataattgggttctggtgagagagctctcttgggtttcagactgctgccttctcaatgcagcttcacatggtggacagaaagagctctcaagagtcatttttaagggcaccaatctaatttatgaagcctccaccataataagctaattacttcccaaagttcattataaatatgcagcttataggtcctgctaccatcatactgaaggttaagttttcatcacatgaattttgaggggacacaacattcagttgcaacaaaaaatactcagtggtttttaattacaatattgattatgtaaatacagaataaattttagctctaaacattatccatgatgtgattaattaaattactagtttaaaaaattgaatctgtaatttatcttgcctctataattattataagaacttgtaaacttttaacttgttttctttaatttgaccatttctgaaattgtatctctaagtattgatatatacacttcctagtgcatataaaagttatgcatatttagagtaataagtagtgtgttatcatgtttttatatcagggcaggaagggagaagttgaagaacaaagtgtccttttcaagaacttcagcccacgtatgtttctacaggactataacatgtcaccagccacaagggcaaggagactgggcattgtagttatttggcaggacacattgctctttcaaacaaaaatggcattcagaaacaagaaagtagggaagagaggttttggttggacaacttgcattgttgtcccttcttttcttagacttccaaattcttggtttcagaattcttcataaggttacccctctgagtaattttatcagaggggtaattaaatctcccaagtccaggtccccaagctcttctcaactagtatgacagcaacttgtatagagatgtcaatgcagtacaaatgcttgttttaaagttgttttaatccagcttctatcattctaaatattgttttaatccaatattctaattcagaatattgagaataaactaatcttacatgaaatatcttttttctcctattatttgatatgtgtgtctataaaataacattttctaattacagaatgtgcaagcaaaaaacaaaaagggcctgtgtccctagtcccattttcttgcttggaggtaacatccacaacatttttagttttctgttgttcttctctaatgctcccaataatataccttttttgtggttattgttgttattattgctcttgcatcaagcactatctcttagtgctcatgcacatccttaccgaggtccatttctttactctctgccccattccaagttgtgttaggtagaggattatactgatcaagtcctgtttttagctatcttcatgacattaacactttaaacctcaatgtcttcactgttctactgtcctgtgagctctagcaatctcaagtttcatgtcacttctcagactatggcaatggtaatctgcattaatggcaaaatcattaatattgatgaaaatttttattttctgcccttcccaaaatcatctacttctttggaatttacattagcaggcaacaatggcagtggcaatactaccttttggaaggtaactgtagctccacccttatctgtaaaaagatatgtgttaagacccccagttgatgcctgaaacagtggatagtaaacatgtactatttttcctacacatacatacttataatagactgtaatttaaaaattaggcatagtgaaatttaactaataattatagtagtttattagttaaactactactaattattatagtagtagtatttgtttaaactaatatactcattatgggagtagtattaaactaataggctaattttattagtttaataattctattagtttattagttaaactaacactactaatgataatagaattatattagttatactaatatattatttataggagtagtatacttctataattatataggaatataaatatattccttttactaataattatatgaacataacataatagaattattataacaatatactgtagtaaaagttatgtgaatgtggtctctctttctcttgaaataccttattattatctacttttctttttgtgataaagaaaacagggagtaggatggacaacctgagaatttatcacgttatggtacacaatatcaaagttattatttctataaattttatttaatatttttcaaaacatgattgacccctgatagctaaaactggggaaagtgaaaccgctggtaaggggggactgctgtgttgctaaaagtgtcttcctttgctaaatgtaccaagagtagattctcaagaggagtaacatagataggaatttacgttgtagatggcctcagctattgctaaatatctacaaattcacttgggaataatataagcagccacatcagcaacaatatcttgagtaatattgttaatggagcatcaggaattagggctttgcaattatgagatacatttttccaaagacatgatgcaaacatccttagcagtagaagaaaaaagttgaattccaactctttgtcaagaggcatttttgggaattgttattatatccaattttcgcccaggattatgtggcatgataaatatgccttacaataacgtagttaagaatattataggtaatacatatttcatcaccttaagaaatgtgaatggctgtttggaggtatattaacatcatgtagatggaggttcaagactgctgagataaaattgaatacatttagaaagactgatggcatattttcctgaagagaatctttagaaaaccaaagagttaatgtcaggttttcatatgtcttagtagtctgaataaaacctgttaaataatttttcctggaagaaacatattaatatttaattttcaaaaagtgatattaatagttaattatccagttatctggactttttccaaaagagtttatctataaagagcatctactctatgaaatgtagaaataaactcaaaggatagtaaatcagtattcagtctgtaaatattacctcactgtgtccatgacatttgtgaacttagtaaccaaatttaaggatttaatgtgtttgcttgttgttaacatatatggagagagaaaaataaatggatgaagtttcagaatttatctaattttctcctccatcaaagttaaaaattagctgtttgatttcctatactgagctaaaattctctggcattttatcttgatattactgacatcctggaaggagtatcttgtttgtttggcaagtggatttttttaaaaaaataaattattgcttcataatttttattgtttatatttcaaggttatgaaaaatgcccttaagaaatagatggtatatatatatatataaaatatatattttaatctgcatgtagtatacctgttgtgacaaaaataaacgaaagcttaatttcttgccaagttgtagactattacagtatattattttaagcgttatgctatacatacttcttttgaaaatttatggagtacatgagatgttttgatacatgcataataatcacatcagggtaaattgaatatgcatcacttcacacagttatcctttgtgttacaaacaatctgattatactcttctagttatttttaaatgtacgattaaattatttttgactatagtcaccctgttgtgctagcaaatgctaggtcttattcattctttctaactatgtttttgtacctattagtctgccccgctttcctcccaaaccctcactacccttctcagcctgttaacctttatactgtttatctccatgagttcaattgttttaagccttagctcccacaaataagtgagagcatccgaagtttgtctttctgcgcctggcttgtttcacttaacataatgacctccagttctatccacattgtagcagatgacaggaactcattgttttttatggctgaatggtattccattttgtatatgtactatattttctttattcattcatctcttgatggatacttaggttgattccaaattttggctattgtgagtagtgctgaaataaacatggagtgcagatatctctctgatatactatgtcctttcttttggttatacacccaggagtgggattgctggatcatatgatagctcaatttttgctttttgagaaacctccagactgttctccttaagggtcatactaatgtacattcccactgacagtgtgcaagtgttcctttttctgtatatcctcgccaacttttgttattgcctgaatttgggataaaagccattttaactggggcctcttaactttttccccacacatttcttaattccttgatgaaaaatgctaaaagataagtcactttcatacttcctagatacagttattcattcactcttatttttttaagtttcttatttaatagatatgtattaaatatttaccttgtctcagccaatgtaatgtgtgacaggcatacaaagatgaatatagcagaaagtttatgcctcttaagaagcataatgaagtcatttaaacaaataatagctacaaattttgatgagcactgtcatagaggtaagaatattatggtggggtgggatggaagaaattaaaatatgtcaatctactttgcgttgtaaggaaaatcttggcaaagaagatacatgttatgatttggctctgtgtccccacccaaatctcaactcgaattgtaatccccatgtgtcatggggagggacctggtgggaggtgattagctcaaaagggtggttttctatgctgttcttgtgatagtgagggggttctcaggagatctgatggttttataagtggcagtttcccctgcatgctctctctcttacctgccacagtgtaagacttgccttgctttcccttcaccttccaccatgattataagtttaattataagttcacttataagttcagccatgtggaattgtgagtcaagtaagcctcttttgtttataaattatccattctcaggtagtatctttatagcagtgtgaaatggactaataagataaacttcaatagaatacttaagaagttgtggtaatcaactagtttatgaatggaaagaatcattttatcaaaggaaattaagagcataacaatgtggcattaaaacagattagggagttctgagggttgtaaggatgatggaacaggtacataataggacaatatgggagaataattaaagaagtcctgagggtaggtcactgaggccttatatgttataaaagggggattttactctaggaattgggaaagtgtttgaagaaagagaatagtgtgattatatttgctttttagtttgaaaagaagtagcctggaaatgaatgagattacagccagagaagagaaagaatatattttgatgaaagaatatatttgggtactgatacaatagtccgggttaaagatgatttggaccctggcacatggaggatgctgtggggtcataaaggaagaaatggtaataaaaataactaaagttttattggatgaagttttcaagccaacaaagcataaaacacagacacaaaaacgacgtctaaaatgatttcttagtttcttagtcatgtattaggtgtcaaccaagacagggaatacagacagagcagtaaagagttcagccccagactcaatcctatatgtgatttttgggcccatccataaacaatgacaaagacttgaccaagtgggtcccacagggagagctgccctccccacactagtgcatagtcctctaatggcagtttcagtaagggctgcagggccatgctcacacacagatcagcatcacttgactggtgcctcccctggaggcctctccactgtgggaccttggcagaccttccccaggcatgtttgcccaagacctccttttcatggggagaggaggaggagtcttgaagacaattgtcttccttctgattcaatactcagtgcttttccgctcccagccttttcctgaacttccataaaactgcaggcaggagcctgttgttcagggttcctttgatagtgagacaactccacatctgtgctgacccatgtgatccttgatagagctgtttcatgaaggaaaaaaaggatggggactggaccgtcagggctttttccagtttaacctcaaaggtttgttaatgtccttttgtcttgatgtcttaattgcctactccaacacctggctctctctccagagtagttaagctcctgatggctggggataaatttaatgactactgttttgtataagttgaggttaatctaattaatttacctagagggaaaattctgacctctatctctgagacctcatctaaaacacagaggtcatgaagataaatctggcttctgccttcaaggagcttacagtctggtgaagatgatagctggatagctagacataacaataaaaccacagctgttcccttgtgataatttctgttatgagttatgtacattggaatatgaaaaatatataaatggtacataaccaattctaggaggtcagggcaagcttcctgggagaaatgctgtctataggtagacacagagagacaagaatcaaagcctcttctgaagaagggttaaataaatctcaggcagataggctatgcatgacctgcttcttttatctgtcatttttgttgttcagttacttgctaaattttaagaattttatatatatatattatatttataatatattatatatataatatacatgtatatatatatatatatcttctacatatcagtgctctgtcaattcagcctaattctggcaaaagcattaaggacttcaatatttaccaggtttgaaaggggagcagtcctttgaattagaattatttgaaaaatgtagggctattttgaaacaactacccaattgaaaatgcatggacactataactattatacttgcagatgcatacaaaaatacttttattgtcacatgggcacaaagatgtatattgaaagctgttcactgaaacagtatttataataatgaaacctggaagcaacatatctcttaatggggatatagacaagtaaagtacaacatatacatgttatagaaaaaaatgcagccttctcaaaagtgggtaagctgtatagatatagaaaagaaaaaagcattgtataaataatatgtacactttaataaaagttgtactaaattttaaatgtaatataaatatcataccttctatatatataaaattatcaaaaagactgaattataatacatgaagagtaggaaaaaatagttgcactgagttttatattttctgaatgtttaaatctttccacacaatatgtaataattatacttttaaaatgccagtaaggtaatatatacaaatagctaattaaagcttaataagaactttggaaaaatctttttaataaaggttttacatacatcagggttacaattaaatttaacatgctttttattttgtcaatttcttttatttaaaaaatacttaaactaacttcctttttgctttttcctattaaaagaaaaagcattttgccctcataaaagaaaattagtttcagattactagtaattatttaggtactaattaaaaaataatgaatctcagttactaaatacacaaataagggagttatatgaaactgtgcaatagtcattctatggatagtcatatttaaaataaaatgaaaagagactaaaatatgcatttgtgcttttaactctgaaaacctgaatacctattcaactgttgattctgagtatttacagaactttatttcttctttggacatgctttcgcagtttttacctaatgtatacacatttttgccttgttcttaataattaaatatctgagaaaaagatattcaaaaagtggttttttgtgcgtactcatgataaacagtaacataaaaagttacagaggtcgggcccagtggctcacgcctgtaatcccagcactttgggaggccaaggtgggtggatcacttgaagtcaggagttttagaccagcctggccaacatggtgaaactccatctctacttaaaaaataaataaataaataaataaacaggcatagtggctcacgtctgtaatcccagctactggggaggctgaggtgggaaaatcacttgagcccaggaggcggaagctgcactgagccaagatcacgccattgccctccagcctgggtgacaaagcgagactccatctcaaaaaaaaagaaaagttatagaaataaatatgatgatatgatttactgaaagcaagtctcaaatgcctaaaaaaggccaaacttcctttggtctttggatatcattctggagggtgggtgagtctacttttgtttcaaatgtgttattttcatttatttttgagcaaaaatatcattttataatttacacttattgaacataaatgtggaaatactactaaattgtctccacatggaaaatttcttgtgacatgtatttcatctaacttgtgaagttcacaactatttcaaaaaacagttaagcttgttccaaaaactcactgccatcccaccaaacacacatatggacttgagaataattaggctttcagaaaccactttagtatccaattaattgtagttttcttcagaaagtggtgtaaatctgattatatatagttgcttcatgtagtataaatctgattatacacagttgtttcatatagtatatatctgatgatatacaattgcttcatgtagttcaacttgttactagataatccatgtgtaattgtcacagaaaatcttacgtgtacatttggacaatgtctctatctctgtttctttctctctgtttctctctctctctctcacacacacacacacagtcctttacaattactttgggaaaaaaatcacaaaaaggaaaaaatcattaatctgagattataacataaaatccacaatttgtctgtaaactatctttaaatctatgtttatacttgaaatctactaggcttatgagagtcaaagacttccaagctttgaatattcttttcacttcaaaaggaactgaaaatctaaatgtaatttggtacaccttttaaaatattcactgctgcctgccagctagctgcaggttattttagctactagaagcagcactaatttgcaatatctttctaagactatctataggtaaaaatttgacattggctgactctaaccaatgtcaagctttaggatagcaacgtaatccctaaaagaaaaatgagaaataacctaactatctaaacatcaaaaacaaattaaccttgcttgcccatttttaggacaacataacggtttcttgagattttccaacatttatgaaaagataaaaattaagatgagtcatttaatagcatgcgtgcttgaaccaataaaatgatttcttattttatgagttgtttttaaaaaatgagcccagatgtttcaaattataaataatttgtcaatttatgcataaagccaaatttgaaaaatgtgactggtcattcccattaagaaactcaactgaaaatctgtttcactgaatcaagcttaaataagtaattgtgtacttagatgtagctgaattctaagaactatttggaccacaacttatagactatttatatattttgcaaactgtttgctgttctctgacttcaagtaagagagagatattaagtgacaaatcatacaacggaaagggagagctattaagtgataaatcatacagtggaaagagagttatataggaagactctccattttaactcagaataaaatatgtaaccatctttaagttttaatggggagacctgtgtggctgacttttttttttcccaatctagcttcctcatttggaagaatgttttgtttctgtatatgaaaactgaaggatttctattcaaggccactgtggtagacagaataatggcttactaaaatgtcgacgtcctaatttctggaacctgtgaaaatgtcaccttccatgacaaaaaggacattgtagaagcaattatttaaggatctagagatgagaatattaagatgggttatttgggtgttccaaatgtgaacccaagtggagttcttgtaagactgagaagatgccttcgagttaggaaggagatgggagatgtgttatgaaagcagaggttggagtgacagaatttcaagatggagaaaggggttatagccaagaatccaagcagcctcaagagagtagaagctcttgattttcacctatgtgactctattttagtctttacttgcagaactgtaagatagtagatttgtggtgttttaatccactaagttggtagtaatgtgctccagccactatgagacaaatacagtatacacacacacacacacacacacacacacacacacacatatatgtgtgtgggtgtgtattaggaaaagtagtaaatctaaatctagactttctcattctcacctaggttcttatatttttaattatataactagttacataacattatttatataatactagttatataactagtgctctgttattttccttctattttaatttttctgttaaaagaaagtttaagaacatatgtatccatatatgtatatacacatgcagaaatatatatctgtgtatgtgtgtgtgtttatgagtatatatattcaaagttctgaaacgtttttcaaagcaatgctggcaatggaattctcatttctatttatcttttctgtggaggtttaagtatgatttatttgggaattgctacattatcctgacaaaaatataacagtagtggcaatatataatcccccaaaaatgttatatctccagataacttttaatgagttggcattgactagtatgagaaatacaaggcacagagagtgatatggtttggctctgtgctgtcacccaaatctcatcttgaatcgtaattcccataatgcccatgtgttgaggggcctggtgggaggtgattggatcatgggcacagtttcccctagatgttctcatgatagtgaatgagttctcatgagatctgatggttttacaagtgtttgacagtgcctccttcacatgctctctctcccctgctgccatgtaagacgtgcctgcttccccttccaccatgattgtaagttccctgaggcctccccagccgtgcagaactgtgagtcaattaagcctctttcctttgtaaattaccctgtcgcaggtattctttatagcaatgtgaaaatggattaatacagagagtctacacatttctttatataagatatacttgttttctgtttatagttagcaattacaaagtttacagtaaaatttttacttacattcatataacatttaagttattctcaaaattttatgcaaccattttagatctaaagtggactttgtttttttccatagaataagtattttgtaggacttctcttcaatattggtgtgtagaaaaaaaaatgtgaacttcaagtttcaatcaattaaacttttgcttaaactgaaaaaccatgccaacacacaaaaaggtcatctggggtgtgccattacattaggattacatactggtactacacactcagttgtgtaggacataagaatggattatacttaaacctctaaaggatggcctgaattaaagtgatagaaaatgggagttaatattgctagtgttaccatgtaaaatttaataattatttgcttaattattgtcttattaatttaatagtttctaaacagaaatttcattaacaaattaacaggaacagctacaaaatttgcagtgttcagtgcaaaattaacatataggacatcttactcaaaaattatttaaaacttgacacgaatgacaccaaagaattagccaagtgatgggcccctgcaaatgagcagatcacataaatctatccctgaacatcaattagttataaaaaaataagaatttaaggctgggacccatagccataattttacccatacctgcatttatatctgtatttatatacctgtaacagtatttagatctatttattcacaatctcagaatcagattgtagagacatttaaagattaactaatacaaacttgtcctcttacaaaagagaaaactgagccgcagtgctttgattgtatcagtagctaatattagaaataaaagcaacacattatcttaaatattttatgtttttcttattactaccagtttagtgctcctatgtattttgtagtacttctcttcaatattggtgtgtagaaagaaaatgtgaaccccgagtttaatcaattaaactttgattaaactgaaaaaccatggtcaatcccaatacacaaaagggtcatctggggtgtgccattgcattaggattacatactggtactatatgttgctgctacatgctctttcactcagtcgtgtaggacagaagaatggattatacttaaacttctaaagaatgacctcaattaaagagatagaaaatgggagttaatattgttagtgttgccatgtaaaatttaataattaatataatgtctcatatattccgtggtgattaattggtgtggaatatttaagccacgagaataagtactataaaagcaagaatttataatagggtctttaatgatcagttctgttcttacacagcttctccccactcctactccttggaagcaaccaagtggtatgagttggcccctactcaccccctccctggtgtcagtggaccacatcagggaagtgaggttattttttcacttggaggaaacaaagatatgtaactcagtaccctacttttgccatgaggttgccagtgggtggagggagaagacaaacttccacctaaccagtctgcaagaaggaagtataagttagtactctacttttggtaggatggtattagtaggtcccatcaggaagataaacacgcacacccacccagctctcaggttacacatcaatagggaaccatctacgaaataataagagagaaaaattctcataatataaaaaaaaattcaggacacaataaaaatcacttataagacaaaagaactaggaaatcataacctgaatgagagaaagacaacagacaccaacacagacataaaaaaggggttggggctgggcgcagtggctcacacctgtaatcccagcactgtgggaggccaagatgggtggatcacttgaggtcaggagttcaagaccagcctgtccaacatggtgaaaccccgcctctactaaaaatataaaaagttagctgggtgcattggcacatgcctgtaatcccagctacttgggaggctgaggcaggagaatcacttgaacctgggagatggaggttgcagtgagccaagatcataccgctgcactccagcctgggtaacagagtgagactgtttcagacaaaaaaaaaaaaaaaaaaaaaaaaaaaaagaggttggaattatctaacaaggattttgaagaaaccatcataaaagtgtttaaataagcaattatatattgtattctcttggaacaaataaaagttaaaattaaaaataaattcaataatgacttataagttataaaaagtaaacatgaactaaataaaattaaaatacaataatggaaataatagatgcagaggatggtcacaaaagaagagagcacagagcagaagatggaatcagtgaatctgaaaacatgccaacagaatttactgtctgaacaagaagaagaaaaccgataaaaaaaaatttaacagcatttcaggaaactttagaacaataataaaagagctaacattcataatcacaggagatatagaagacgaggagatagaatgtgggactaaaaaactattaaaaaataatgacttcaaccttcccaaattagatggaagacataaacctaaatattcaagaaacagagcaaaccctaaatagaatacacccaaatacattcaatttctggaaatgaaaaaaaaaaattaaaaatcttgaaagcaaacagagaaaaatggcacatttcttacagaaaaacaataatgtaaaccacagcagattttccatctgaaaccatgaaggttggaaggaaacagataatatttttgaagtactgaaagaacagaactgtgaactgtaaattcaatacccagcaataatattcttcaggcactaaagtgacatagaaaacattgtctaatgaaagaatgctaaggtaatgtgttgctaacaaacttacctttaaagaataagttctctaaacagaaaagaaatgataaaagaagaaggtttgcagcttttacaaacatccatctaaatgggtaaaattaagcataaatataatgtataatcaaacttctcttgagtttttaagccatttctaatagttgaagcaaaaattaatgacctatctggttagatgctcaaggaacatagaggaagtatttaagataattatatctaaaaagtagtgatagtaaagagactcatatggaaacaagttttctacacttcactcaaagaggtaaaacatcattaacagtagatcttgacattacacatatattattttaaccagtgcaattaataaaaccaaacaaaatcatgtacaatcatgcactgcataacgatgttttgctcagcagtagactgcatatatcatggtggtcccataagattataatggagatgaatattacctagtgacattgcagctgagctgtcttaacatcatagtctaacatatttctcacctgtttgtggcaatgatggtgtaaacaaacctacttcattgccagttatataaaagtgtagcacataaaattctgtctagtactgatattgtttggctgtgtccccacccaaatctcatcttgaattgtaatcctcatgatcctcccgtgtcaagggcaagacccggtgggaagtgattggatcctggaggcagtttccctcatgctgttctcatgatagtgagtaagttttcatgagatccgatggttttaaaagtgtttgaaaatttctcctagacacactcattctctcctgttgccttttgaagaagccaactgcttttattccaccatgattgtaagttttctgaggcctctccagccatgcagaactatgagtcaattaaccctctttcctttataaattaccctgtcttgggtagtatctttatagcagtgtgagaacagactaatagagtaaattggtactgggagtggggcactgctataaagatactgaaaatgaggaagtgactttagaactgggtatcgggcagaggttggaagtgtttggagggctcagaagaagacaggaagttgtgagaaagtttgaaacttcctagggacctgtggaatggttttgaccaaaatgctgatagtgatatagacagtgaagtccaagctgaggtggtcttggatggacaagaactcattaggaactagagcccaaagatcactgttactctgccttagcaaagagactggaagcattttgcccctgtcctagagatctgtggaacttttaatttgagaaacattatctcaaattggaacttatgtttaaaatggaagcagggcataaaagtttggaaaatttgcagccggaccatgcagtagaaaagaaaaacccatttttcaggggaggaattcaagctggctacagaaatttgcctaaataacaagaagccaaatgttattacagtagccaaaacaatggcaaaatttttcttgggcgtatcagagacttccatggcagcccttctcatcacagacccagcagcctctgagggaaaaatggtttcatgggctgggcctagggccccgttactctgggcaacctcaggacttggtgccctgtgtcccagctgctgctactccagctccagccgtggctaaaaggagccaatgtacagctcatctgttgattcagagggtgcaagccccaagccttggaggattccatatggtgttgggcctgagggtacacagaagtcaagaattcaggtgtggaaacctctgcctagatttcataggttgtatggaaatgccaggatgtccaggccgagattggttgcaggggtggagccatcatggagaacctctgctagggtagtgcagaaggaaaatgtggggttggagctcccacacagattccccactggggcactgcctagtgaagctatgagaagagggccactgttctccagacccctgaatggaagatccaccaacagcttgtactgtgcacctggaaaagccacagacactcaatgccagcctgtgaaggaactgcccaaggccatgggagcccacctcttgcattaacatgccctggatgtgaaacatggagacaaggagattattttaaagctttaagttttaatgactgccctgctgggtttcagactttcatggggcctgcatcccctttgttttgactaatttctcccatttggaatgggagcatttatccaattcttgtaccctcatggtatctaggaagtaactaacttgcttttgattttacaggcttataggccaaaacgtcttgccttgtctcagatgagactttgaactgtgggctgttgagttactgctgaaatgatttaagactctgggggactgttaggaaggcatgatgttgggttggaaatgtaaaaaatatgtgagatctgggaggggccaggggtggaatgatatattttggctctatatccccacccaaatctcatcttgaattgtaatcttcataatacccatgtgttgagggcaggatctggtggaaggtgattggatcatgtgggcggtttctgccatactgttcttacgatagtgagtgagttctcaggagatctgatggttttgttaagtgtttcacagctcctcctacacacaatccttctctctcctgttgtcttgtgaagaagatgactgcttcccatttcaccatgattgtaagttccatgaggcctcctcagccatgcagaactgtgactcaattaaacctctttcctttatgaattacccaatctcgggtagtgtctttatagtagtgtgagaatggactaatacaagtacattttacttagtaataataataaacaaatatattacatttttgtgtatttactacaccatattttttattgttattgtagtgtacaccttctacttattaaaagaaataggcccgaggtgggcagatcacgaggtcaggagatggagaccatcctggctaacatggtgaaaccccatctctactaaaaatacaaaaaattagccaggcctggttgggggcgcctatattcccagctattcgggaggctgaggcaggagaatggcgtgaacccaggaggcggagcttgcagtgagccgagatcacgccactgcactccagcctgggcgacagagcgagactctgtctcaaaaaaaaaaaaaaaaaaaagtaataggcaactgtaaaacagcctcacagtggtccttcacgaggcatttcagagggcattgttatcatagatgtcgacagatccatatgcattattggcctagaggagcttccagtgggacaagatctggaggtagaaaacagtgatgttgatcatactgaccctgtgtaggcctacgctagtatgtgcatttgtgtctttgtttttaacaacaacaacaaaaaaattaaaaattaaaagatgtaaaattacaaaaaaatcttagagaataaggatataaggaaataaagtatttctgtgtacaatatgtgttttaagctaagtgttgttacaaaagagtcaaaaagttaaaaataagttaaaaagtttataaagtaaaaaagttactgtaggataagtttaatgtattttgaaagaaataagtttctttataaattttataaattcagtgtttataaagtctacagttttgtacaatgatgccctaggcatttacgctcactcaccacttactcactaactctcccagagcaactcctagccctgcaaacttcatttatagtaagtgccctaatcaggtataccatttttgatgttttgactggattttttactgtacctttttttatgtttagatacacaaatatttaccgttgtgttgcagatgcctacagtattcagcacagtaacatgctgtataggtttgtagcctaggatcaataggctgtaccacataacctagggtgagtagtaggttatgctatctctatttacacatagaatacactatatgatgttacacagtgaagaaattgcctaatgcatttctcagaatgtaatttttgtcattaagtgatgcaacattgtatttaaaacactataaataaattaagatggaaacttaacatgtttatgtaacccattggaaagcaagaaaaagacacagaggaataagaaacagaaacaaacagaaacaaataacaaagtggtagacatcaaccacaacatacaaattgttaaacataaaaggcctatagaaaccaactaaaaaacatagattggcagagtagttaaaaaaacaaaaatcaaaaacgaaaaaccatggccaacaatattgtccaaattgcatttgtaccccataaataaataatttttaaaattctgtctatataaaactaacttcaaatacagcataggtaagataaaagtaaaaagagagaaccagtaaaataatttaaaaatgcaagtgaggttatagtaatatatcagctacataaattttattttatttattattattattattattattattttgagacagagtgtcgctctgtcacccaggctggagtgcagtggagcaatctcaaactcactgcaagctccacctcccaggttcatgccattctcctgcctcagcctcccgagtagctggtactacaggtgcccaccaccacgcccagctaatttttttgtgtttttagtagagacggggtttcaccgtgttagctaggatggtctcgatctcctgaccttgtgatcctccagtctcagcctcccaaagtgctgggattacaggcatgagccagggtgcccggcccagctacataaattttaaaaagtaaaaaaagtcaaattgcgtttttaaatattttacattccattgccattcaaagaaataacattgttttcaatacgattaagcaagtatcattagacctagaaatagccacaatcatttctttaaaagattattaatatttatttatttatttatttatttttaggcggagtctcactctgttcaccaagctggagtgcagtggtgcagtctcagctcactgcaatttctgcctcaccctcccaagtaattgggattacaggcacgtgccaccacatatggctaatttttgtatttttagtagagactaatttttgtacttttagtagagacagggtttcaccatattggccaggctggtcacaaactcctgacctcaggtgattggcccgcatcagcctcccaaagtgctgggattacaggcgtaagtcatcgtgcccagctaagattactaatatttataagctctaccttctttcttggagaaatgactttataatttcactttctaattcagttacctgttgaaactaaattaaaatatattcatatgcaaaatgcaagtaaataaaaacagcagctttctctatgctaaaaggaagttcctttggagctcatttccttgacaatgcaagaaagtacttcactgcactatcttcattatgcaaataaaggtgcattttagctctttgaagaagaagaggaagaacatgtctctcaaatggcaggaaagaacaaatttccttaaggaagagtgagggaaagttcatcaacaccaaccctaggtacatcttcattcagacttgaaaagcttttgaatagcgtctgtttattcctgttagaactgaactggcaggaaaagacaatggagaagccacaaagaggagtagctaggtagcagcattcaggtccacaatgcctggatttcattattattattctactgtatcttcaggcagtttatgtaaatcatgttattgagttctctcatctggaagatgagagtactaatagttccagcgttcttacattagtgctgctgccattagttatcatcatttaagtgtctgttcttattgttcaaagagtgactggcagttgagagtccctgggacctgaagtagggaggtagagaattttgcattggagtatactgttatcttaaccttggaggcctgagtgttcttaggtaaaagactgctttggaggctgcaaatggaactagaatcccaccagatcacagccatctgacttggttgcgtttttatggaaaccagcgtgttgaggatgtgagactgatataaaagcactaggatattcacagggtaaaagtcaggaggatcataacagcacagtactagagaaccagtacgtagtggtgtgatgaatgaaagccactgacataactttcgcatcttgtcttcctgtattctttctttctgtgacagttgttgagatcatgacctcttctggaatggtgttctcagaagtccttggacaatcagggtgtactaggagaaaacatgctgtgagatgggatgaaagtcttcaggatggacactatactttctgttattggaggattcggtagtttgaataagcgtttgaatgaataaaatatttgagttgaggactaaattctgatttttttttttcatcttgcccaaattcctatttaaagaaactgggagtcagccctacgaatgataacatctctttacatgggttttttattaaccctatataatgtggcttgctttccaacctgactctggtacagcatcacataacagacagcagaccctgaaggatataaaaatattttgccctaaaatatatttctttgatgtcttttgaaatggctgttgcaaggccagcaaactgaggtagaggaaatttgcatctatggagaatcttcattaatgcagccatgcttcccctttctatgcctttccaggacctaggagtgattgagagtctgatacctttaaaggtctgaaaagaaacatttaccatctattctctctgagggccacctatgaggcttcatctacttaataagatccttggtctttcccccactcttatctgaactcaggcattcctttctatcgatttcaagactttagacgatagcataactctctcaaccaattgtcaactaaaggatccctaaaagccccttatgacgtacaagctcctaccctgacctacctgcaattacctgcagttggttgtctccttggaatgtataaaaccaaagtgtaacccggttgccttgggcacgctttcagaacctcttgagatagtgtaacccaggccttggtcacttatactggctctgaataaacctctttaaatatattttgacagaatttggtttttgtgtatttttctgtgtatttctacctctgagaagaggagtaatttatactctttaaaaatcatggtcaggtatgactggtgctagaatgaggatgaagggaagagaaagggaagaaataattctccactctttgtttccaattttagttctttaaagtaaaagtacaaaacattttgtagagatgtagtttgtggtggcatggttgaaaaacttctgcagtttatgattcctccactacagtgtgataatgttttaaatagcatttaaaatgtagattctgtccaatccttacaattaacttttttattgtttggaatccatgaagttggtatatgcatgagcagatacatatttatttaagaaaaaaaattaggccttacagaaaattggtttctcagagacatgataaaagttaccagataatgtctctcagactatatctatgaaaaaatacataaccaaatagacaccaattgcaaatgaattaattacattgaaattctaataactttcatttcctaaactgacattgatggaaaagaattctaagatataaaataagctctacttcatcctgctttcaatagcacatgatttaatcagaatatataagtaatactgttgagcacataaatattattttcattacttgatgataattatgactattttcattgctataattttggtcatgccatattgattagcaataaaatatatacttagctagagaggcagctaatccaaaacttttgggatttctttttttttttagattattggtgctcctcctcctgtcattgaggttaaaattaaatgttacatattccttctctgtgtatgtgtatcttatttcctcatattctacctcttcagagtagtgtgtgtgagtgcatgcacacacacttgcatgtgagagcttctaatatctaaattaatgttgaatcattattcagaaacaaagagagctaactgttatcctgactttattctttatgaagaaaaatacagtgattccaagttaccaagttagtgctgctttatttataaatgaagtaacattttacaagttgtgcataagttaaaattcagaaataaaacttcatcctaaaactctgtgtgttgctttaaataatcagagcatctgcctacttaattttttttgtgtgggtgcacaatagatgtttaatgagatcctgtcatctgtctgcttttttattgtaaaacaggaggggttttaatcctggaggaacaactgatgtacctctgaaaaagagagggattagttattaattgaattgagggttgtcttgtcttagtagcttttattctctaggtactatttgattatgattgtgaaaatagaatttatccctcattaaatgtaaaatcaacaggagaatagcaaaaacttatgagatagatgaacattgtgtgagtggcatggtttaatttgtttggaagaagcacttgccccagaagatacacaatgaaattcatgttattgagtagagtagtaatacagtgtgttcccttgtgaagttcataaccaagaattattttagtagtggataggtaggctgaataattgacttcctatcattttcaggttctgtgtttgattttttttacatattaatttctttgatccacattaagctcagttatgtatttccattttataaatgaaaaaaaaaaaaataggcacttgcaaatgtcagatcacttgcctgtggtcattcgggtagagatttgtgaagctaagttggtcttaatcaaatgtcaagcttttttttttcttataaaatatagattttaatatgagttttaaaataaaattaattagaaaaaggcaaattactcaatatataaaatgtattgcatttgtaataggtaggtatttcattttctagttatggtgggatattattcagactataattcccaatgaaaaaactttaaaaaatgctagtgattgcacatttaaaacaccttttaaaaagcattgagagcttataaaattttaataagtgatcaaaccaaatttgaagagaaaagaagaacccagagaggtaaggatataaccttaccagttgcaatttgccgatctctacaaatattaatatttattttgacagtttcagggtgaatgagaaagaaaccaaaaccgaagactagcatatgttaagtcttcttaaggagccctcccttaaaagattgagatgaccaaatcttataccctcagcataaggtgaaccagacagacctaaagcagtggtagcttggatccactacttgggtttgtgtgactgcgtgactcaggtaatctcaaaaattgaacatttttttaaggtggtcctactcgtatgcccaggtgttagggagaagcaaatctgaatgctttataaaaataccctgaagctaaatcttacaatattctcaagaacacagtgaaacaaggcaaaataagttaaaatcaacaaaaacaacatgaaacataattagacccacaaagacttcaaacattggacaatatcagagaaagataataaatattttactctttaaaaatttagttaaaagcttaaactaattgtagagaaaaaactgtgttagtattatattgtggatgaaataagcaaaacatttaaaatacaaatgtgattacttaaattaaatataatagataatttaccaccagattagataccattgaaggaataattaatatactgaaatacaggtcagtagaagtttttttcaattcagcatggagatgtaaaaaatgaaaattaatgcaaaaaataagggcacaaaaagaaatgagtaattttgatcagaaatgtattaaaattaataaactggaaatttgacatttaaaaaaaagcattgtcgtccaagtagatgtgtctattaaatagttgttctcatatccagtaatgtaattattattccccctcatgcagttcagattctggggtaatctttagacatcagttttatcttttatattatttattctgtttactacattttattttgctaatgatatttttaatttctgacattctggagtattgcttgtaaaaggtatttttaaagatattttatggttatttttgtgattcctattcctgtatggacaccaaggctattgacattttctttagtttcttctgttaattctattttcttagtgtttatatcatttcatagataggatattctttattttttatttttatttaaatatttggtgattcttggttttctcagccatctattgtcaagtgttcttattaagcattgttattaaataaagattatttcctctaatcacatgagaatctttatttcccccaagtaattgaaaattgcaatgccatgctgccatgtggtacagcatgggtttgggcttgctttcttcttttttttttaacttttattttaggtttgggagtacctgtgaaagtttgttatataggtaaactcgtgtcatcagggtttgttgtacagatcattttgtcacctaggtaccaagtactcaacaattatttttcctgctcctctgtctcctgtcaccctccactctcaagtagactccagtgtctgctgttcccttctttgtgtccatgtgttctcataatttagttccccacttgtaagtgagaacatgcagtattttctagtatttggttttttgttcctgtgttaatttgcccagtataatagcctccagctccatccatgttactgcaaagaacgtgatctcattcttttttatagctccatggtgtctatataccacattttctttatctaaactcttattgatgagcattgaggttgattctatgtctttgccattgtgcatattgctgcaatgaacatttgtgtgcatgtgtctttatggtagaatgatatattttcttctgggtatatatgcagtaatgcgattgctggttggaatggtagttctgcttttatctctttgaggaattgccatgctgctttccacaatagttgaactaacttacactcccactaacagtgtgtgtttccttttctccacaacctgccagcatctgttattttttgacattttaatagtagccattttaactggtatgaaattatatttcattgtggttttaatttgcatttctctaatgatcagtgatattgagttttttttttttttcacatgcttgttggctacatgtacatcttcttttgaaaagtgtctgttcatgtactttgcccacattttagtggggttgtttttctcttgtaaatttgtttaaattccttataggtgctggattttagacatttgtcagacgcatagtttgcaaatagtttctcccattctgtaggttgtctgtttattttgttaatagtttcttttgctatgcagaagctcttaataagtttaatgagatcctgatatgtttaggctttgtatccccacccaaatctcatcttgaattataatctccataatcaccacatggagagaccaggtggaggtaattgaatctgggggtggtttcacccatgctgttcttgtgatagtgaatgagttctcacgagatctaatggttttatgaggggctcttcccagctttgcctggtacttctccttcctgccgccttgtgaaaaaggtgcattgcatccctttcaccttctcctataattgtaagtttcctgaggccttcccagccatgctgaacttcaagtcaattaaacctttttctttataaattactcagtctctggtggttctttatagcagtgtgaaaatggactaatgaagttcccatttatgaatttttgcttttgttgcaattgcttttgacatcttagtcatgaaatccttgcctgttctaagtccaggatggtattgcctaggttgtcttccagggtttttctaattttgtgttttgcatttaagtgtttaatccatcttgagttgatttttgtatattgtgtatggaaggggtccagtttcaatcttttgcatatggctagttagttatcccagtaccatttattgaaaagacagtcttttccccattgctcgtttttgtcagttttattgatgatcagataatcatagctgtgtggctttatttctgggttctctattctgttctattggtttatgtccctgtttttgtgccagcaccatgctgttttggttaacatagccctgtagtatagtttgaggtcagatagcctgatgcttccagctttgttctttttcttaagattgccttggctatttggcctcttttttggttccacatgaattttaaaacagttgtttctagttttgtgaagaatgtcattggtagtttgatagaaatagcatttaatctgtaaattgctttgtgcagtatggccttttaatgatattgcttcttcctatccatgagcatgatatgttttccattttgtttgtatcctctctgatttctttgtgcagtgttttgtaattctcattgtagagatttttcacctccctggttagttgtattttaccctagatattttattctttttgtgaaaattgtgaatgggattgccttcctgatttgactgccagcttggttactgttggtttatagaaatgctagtgatttttgtacattgattttctttctaaaactttgctgaagttttttttattagcagaaggagctttgcggctgagactatggggttttctagatatagaatcatgtcagcttcaaatagggataattttacttcctctcttcctatttggatgccctttatttctttctcttgcctgattactctggctgggatttcctatgttgaataggagtcatgagagagggcatcaaatctacacatatcaaatactaaccttgaatgtaag

SEQ ID NO: 306 - DNA, 839 bp, Homo sapiens
gtcgtggtttgtgcgcggccaggcgctggagcctccgctgccgggagcaatcagaccttccagctgcctctcatgtacttgtctgttgggggcttgtgttgatcaggagtgaattcacagtctaccatgaattggaaggttcttgagcacgtgcccctgctgctgtatatcttggcagcaaaaacattaattctctgcctgacatttgctggggtgaaaatgtatcaaagaaaaaggttggaggcaaaacaacaaaaactggaggctgaaaggaagaagcaatcagagaaaaaagataactgaagattctgccatgtaaatgtcagcttgagtggactccagctgagaagaaagagaagaaagacttaattattgaataatttgtcagaggataaactcccaacctagacctttcacttaaaatagtgtgaatttgtatatgtttttaaaagaaccagtactggccgggtatgctggcttttacctgaaatcccagcactttgggaggccgaggcgagtggatcgcctgagatcgggagtttgagaccagcctggccaacatggtaaaatcctgtctctactaaaaatataaaaattagccaggtgtagtggcgcgcgtctgtaatcccagctactcgggaggctgaggcaggagaattgcttgaatccgggaggtggaggttgcagtgagcctaggtcgtgccactgccctccagcctgggtgacagagcgactgcgtctccaaaaaaaaaaaggtaaaattaaaattaaaaaaaataataataaccagtattttgtttactaaaataaaatgcctttgtaaaaaaaaaaaaaaaaaa

SEQ ID NO: 307 - DNA, 440 bp, Homo sapiens
  misc_feature (303)..(303): n is a, c, g or t.
  misc_feature (313)..(313): n is a, c, g or t.
  misc_feature (385)..(385): n is a, c, g or t.
  misc_feature (392)..(392): n is a, c, g or t.
  misc_feature (399)..(399): n is a, c, g or t.
  misc_feature (423)..(423): n is a, c, g or t.
  misc_feature (428)..(428): n is a, c, g or t.
tgagccaaatatgagtggccatggccgtgacacagacctcaggagggcctgggaacatgtgcccaaggtggtcgaggtacagcttggttttatacattttagggaggaatgaggcatcaatcaaatacatttaagaaatacattggttgagttcagaaaggcaggacaactcgaagcagcgggggtgggtgcttccagggctgtaggtaaatttaaacattttctggttgacaattgggttgagcttagctgaagacctggggatcaatgggaaagggaatgttcagggttaaggataaaggntccgtgggangcccaagtttttatttgtgcagggggaagctctcagccagacttccaggaggaggaggagagagccgggttnttaaacncttttcnttatcccacttttaaaagggggtnccccnggggttctttag

SEQ ID NO: 308 - DNA, 572 bp, Homo sapiens
  misc_feature (427)..(427): n is a, c, g or t.
  misc_feature (536)..(536): n is a, c, g or t.
  misc_feature (542)..(542): n is a, c, g or t.
  misc_feature (564)..(564): n is a, c, g or t.
  misc_feature (572)..(572): n is a, c, g or t.
cacttttagtcagagggtttttattaggagtaaattttcctaggttctcgataataaaggttaatatatttttttcaaaggcacaacgaagcatcctttcaggtcaccactgatttcaaaacaaaacaaaacaaaacaaaacagaaatttcctgatttgatgtgtaaaaggtcaacatctgctgatgctcagatatggggaatgtggtggaggcggccgaatgggatgtcgagtgagcagtacagttagaggggccatgcaacatacaactgacactccaaacagaaagacaccccaacgccaaagaactacttttccatccatccatttctgaaactttctgacaggccagatcactatagcagcctcaataatctgtgtcagcttgcttctacttgcttccctgttgactaaaatggcacgtgcnaatgcaattgtcaagggcctgaaaggagcacattgtgggggatatataccgttagggcaatgccaagggggatactaaagccgaaaattagactattagagctgaaggntttcanttgcaagttttaacctggtgcnggttccan

SEQ ID NO: 309 - DNA, 31737 bp, Homo sapiens
gaattccagctaggttctcccttttcatctccccatagtaatgattagttagtggggggtgaagaggagccttcccaaacacccaaggaaaagtacacttaaacaagcacatttcagccactcagctagagcttccttcatctactttgtgttattggtggcattagaagaaggctcacagctgtggcctctgagctcaaagaaagttgctgactttctttgtagactgaagttttagataataccatctccttttcccttagtctggtggaaggcagaggctatctctgaggcatccagacgtgcttagacctatccagaggactgaccgcagctcttggttttgaaccaaaaattttggctaattcaccttgagagagtgaccattggttagaaggtgagtagaaggagaatgggagagaaaaatccttagccaactgattagttgaaacttgaaataaagatggtggacaacattaatactgttactattaacatgtaattgaagaattgttttttgtagaatttactaatttggaaatcactggcctatttgtttatggcctgagggaaagtcggggtgagagagacaggaactggggagggaaggcttccctgaggaagcgacttttcaactgcatgttcatttgttaggggccaggcttgaggagcactgaggagaaaaagaggtttctccgaggggcggggacggctggcgcaaggaccctgtgaagcccatacattcgattttgctggaatttacccattttcctcttttctaagaaccatacttcttaaaaaaactgatctcgcctattagactacacaagacaagcatattcctgcccctttttatttgatggcttaacaatgtttaccgggggcgtttattgttggggttcagggacatagccatacttcattgtgcccaagggcaagtgcatcctggcctcagaaggaactgggtgaaatccccaaagctagcaggaaagaggcagaacaccttccccatttctactttttgtctgtttttttctcttcatgaagcttcttatcacttctgcagaccagctttgcgttcctctgaacacatgatcaactgcgatcacagaaaagcttagtttctatcacctcagttctgggtacaccactaactggccatcttgactctcatttccaaatatgggggcaaaaaaaaattgactgattccacctcagtcaagtattcacctttgagccaatcatccgtagtcaagaatgttgattttaaatagctgattttgagttagggagaagcggtttctccttacaccaggtaagtaggcagtctccaaagactccctgtgactttccacatcacgttttagctcttcctaccttgacttccagattctttaaaatatacttatatccttgttccatgttaaccgctacttattaccatgactttaaaaataataatacaccgggcgtggtggctcacatctgtaatcccagcaatttgggaagccgaggcgggcagatcacttgaggtcaggagttcgagaccagcctggccaacatggtgaaactctgcctctaatgaaaatacaaaaattagctaggtgtggctgcttgcgcctgtaatcgcagctacttgggaggctgaggtgggagaatcgcttgaacccaggaggcggaggttgcagtgagccaagatcacaatactgcactccagcctgggcgacagagcaagactctgtctcaaaaataaataaattaattaattaaataaaaaataaaaataaaataaatacaaaaaattagtctattagtctccttttatgattcaattaaacatctgtttttctccccctcatttatcttagagatcatctaattcactctattacaaaccagagatgttaagtgacttacctggggtcatacatttgtggcagaaccctctgtacagggtttttttcagttataaagtgctgcctcctactgaggtttgtgtctgggaccccaggacaaaataagaaaggacatagcaggaatctcacctaacctatgtctcagctcagaggggaaaacttcacagaagggatcagtctggcataagcataccattgaacaggtgtttcaagggggcaggacttggatgaccagatcttagaagaaagacttagtctaagtctctgtgcattctggagaggccttgctcaccagaaagcccaatgttggtgttcagctgctgcccaccttagggtacaatgaaccctattctgctggaagagttgttccatcaaagaaacgggatctttctcagaagtctcatgcaaatattaattcattcagacaaaagcagatgagtagacactgggtgactttgaaccactattcaaccgactctgggcctccattatcaaataaaatggttggataagaactaggcaacttccatgatggctcatagctctaaaatctcatgattccataataagtaaatagaaataacagaagaaattcatcagacaataaacacaaaacagacattaagtcctcaggctaaatgcaatttttaaaattcagccatttttttttaaaaaacccaaataattaaaagcttaaaatttttaagaaaatgatcttataaccactgcatgaaacactatcaacaataaattgttttttaaattatgaaaataggccgggcgcagtggctcacgcctgtaatcccagcactttgggaggctgaggcgggtggatcacgaggtcaggagatcgagaccatcctggctaacacggtgaaaccccgtctctactaaaaatacaaaaaattagccaggcatggtgcacacgcctgtagtcccagctacttgggaggctgaggcaggagaatcgcttgaacccgggaggcagaggttgcagtgagccaagatcgcgccactgcactccagtctggacgacagagcgagactccatctcaaaaaaaaaaaaaaaaaaaaagaaagaaaagaaaactctacatattaaattttatgacacagccaagtgattcccttctgcctcctatgacactcttaaacatagattacctcatggtaacaatactgttctggagcagaaagatacccatcttacataggaagacattgaaatccaaagaaatggatctcaggtgaaataccatgctcatgagaccataacctaaagtttcaagcagtaggcaaaactggaattttttgaaatcaagggaagctttatgttatccaataatactttcattttgattttttaaaggctaatgataaaaaattaaaaataaaaacacaaaagtacaaaaaaagctaatgatgaaactgcacatttagtagttaaatactaaaacaataaaacagggccgggggcggtgactcatgcctgtaatcccagcactttgggaggcctaggcaggcagatcatttgaggtcaggagttcgagaccagcctgaccaacatgatgaaaccccatctctactaaaaatacaaaaattagccaggcatggtggcacatgcctgtagtcccagctacttgggaggctgaggcaggagaatggcttgaaccagggaggtggaggttgcagtgagctacgatcccaccactgcactccagcctgggcgacaagagtgaaattccatctcaaaaaaaaaaagacaataaaacaaattaaagatgatattgaattctttaattatgcagtttaagcttacatatttgaaaatatgagtaaacttatttccctcaaaaatgccaaaaattgctatcaaatagactcagctatttttaggaactttggaagtataaaagttgaaaatttttcttcatgtttgccaatttgaaaaacatcctattgaagaatgtgtgcatgtgtttgtgtgtgtgtgcgtgtgtgtgttgaactgttccttggtgtgtgactgtgcctgtataactattctgatggggctaagtgtgaccaccgcatggagtaatgaagaaagacctgtgtttcactgtgtaagaaaaaatatctagtttcttcaaaaaagagaaaatccctatttacttacttcctcatgaaggactccttcagaaggagccatgaggtatgaaaagggtgttatttctaggcagtgtttccaaaagtgtagtagggtagataattttatgtggcatatgaataaacatttttatttgaataattatgcttttatttttatcattcctctccactctctccttcaacactcacagccttggtaccaccgtctgcctgtgatcactggttttattcacagcgtctatttgggtcctcatgtctgctgccacccgccaggccctgaaggtcacacctcgctgcctactccccacgtaactctctgcatcgtcttttctgaccctatatccctgtattctctaactagaggaacccttacctgtgtcctctgcaactcacaataaatcatcggccaaaactcagtttagagaaccaagtctaactgtctttccaataaagcaaagccattccctgttaaccaagagttataggtgacagtgaatggcttgctttctgtttcaattatttattgctatgtaacaaattgccccaaacttagtggcttaaaacaacaaacactttgtttgctttttaagcttctgtggattgatagctcagctggcagttcttggtgtctttcaaaagatgcctggaactagaggcaccaggaagccccaccaggaggccagcctcctccctctccaatgcaaggcatgtggtctgtctgtgtggtagtttgggggtcccagaagagatggaaaatggaaatttccaggccttctcaggacttaagccaagagctgccacagcgtcacttctgccaccttctattcattaagcagtctcaaagccaggccatattcaaggagagaagaaataaattccacctctgaggggtcgggggtggtgataaagaatttgcagtcttttttagtccatcccagtttctcaagcaggagagttccttttagttttctatgcagaacactttgagagtttctaaatctatttactattctttgggatagacttaaattccctgggtagaaaaagcatgatgtttccccagagcagtacaacattgaggtcaggagctggttcaaacacactgtaagtgattataaaattatgtacacatgagtacatataaatactacttgcctttcaaacaacactctgaaatccaagttttacaaccatgaacctcactttgaaggcgctctcacattctctactttcttagaaattaaaatttattttccagtccaggctgtggcagtcaccgaggaaggaggccagctcagcttggcagtgccagggacatggacttggggaacaccccccacagactgtgagctccttcagcagtgattgtgtcttattctttttcatgtctatgcatgcccttgcctgacacgtaacagacacccagcactgggtcaaggagtaggccgagcacactcaactggaagaaaagcaaacacgaagtcatcatgcccccaatatctactcatggaaaccaagagaaaggtccccatttgccaccaccaagcaagcagagactgttgttttatccaaaatcaaactgcacatccacagaggagagatttcaaacattataagaggatgtcaagaagaaagtttctggaagagagctctgcctttttctcctgtaagcatgctcatcacccagggactagtctgccaaggttatttagcagctaatccaagatttggatcattgcctgaagttacacttgttggtatattgggattggccttggaaaggtatcatacataagagtatgccagagtaaattccatttctttgaagatcagctccatggggctgattttggtccacagcagaacaggcactgattgcttacctgtgaagaatgcaaaataaagcatggattcaatgagaagagaagttcacagcctttggcttcctaaactctgtgtctatgatttttgaagatttttttatcctctgaattgtacacatttgaaatttcaagtgtagttttaaatattttattttaaatattttgttttaaatatttattttaaatattttgttgtaaatatttattttaaatattttgctccacttgatttattttacttctagtatttatttactagaagtattgttccacttctattggaataaaaattattttctaatcagtaaaagcatttctgtccacacctttaaaagttaaaattataaattatcaattataaatttattcaccccaaataaatgtaagcaaataaaagacattgtgtaaattaacctagcatgggaactcttcctgctttcatttaatctcacctccctctgtaaaatttcccagcgtattacactttcaggatatgtgtctccatttctgttcatttcaccatctactgattgcttcttctttttatttaaacttacaaacttatttcaggtaattaaagtcaatctgtaggagggaagccatggtatggacaattcaaaaatcactcatagctgggcgcagtggctcacgcctgtaatcccagcactttggaagactgaggcaggcggatcacgaggtcaagagttcaagaccggcctggccaatatggtgaaaccccatctctactaaaaaatacagaacagtagccgggcgtggtggcgctcatctgtagtccagctactcaggaggctgagggaggagaatcacttgaacctgggaggcagaggtttgcagtgagctgagatcacaccactgcactccagcctgggcgacagagtgagactttgtctcaaaaaaaaaaaaaaaaaatcacttgttcaatttggtaaatatattggcacttacatttgagtggctgtatgatgtttttcaaatcaaatctttttgctctgtggggaaaattgccaattttgctcagttgctcctgagcagtcactcccagcaatttcacctatactagaagcagatgctaaaagatttgccttccctctggcaaattctgtgacttctctgggactgggatcgacaaatgtttgggttcaaagggcttttctctttgcaaagtaaacagaaggaacagagatgtgaagagcgcaagtaattaagtaggaatatattgtcaattacctggaaggtactttacagattgtcaagtaaatgatgatacctccatcatcattcattggtgatatttgttaatgcatgtgcaatgtgcagcactgaggtgaacaaactgaaaaacagcctcatggttatttaggtgatgtgagggttccatcagcccggacactcatctacaacaaaacagcagttctttaaatcagagctttataaagatactacaaggagtaaccgatgtgataatgattggccctccactgcagtataagaactccctgcattttacaatgtcagatttatgtatgactacaaatatattaatttccagtccctctttattctcctaagaatcttagccaagtgtgtaaggggataattcccatccttgatgggagtcttcttcccaaattatccaagttctcctggtccttacaggggaacctcttcccggggagcccctgagaggtagctttttaagttcagtttggaacagatgactttgggaaggaaactctcccagactttgatactcctgtgaaagacatgcaaattcctgcccctcatttcttgttccaggggaattgcttcccgtttgcaccaggctctgcgcgatcagccttctgcccgaccagttctcaaagtgcccagctgcgtccatgggagggaaattttgttttctcctttagcagaattggggggccggctgacgtgagagtttcccagggcagaaacatgggtgccctggtatttgtgtgacgtcccgaaccgcgccacaccgggaggcctgaaggtggcggtggaaccggtgttccgcgcccgcccccgcgcgcctggggtctgggagggcagaggctgtcactgtttaacttggggccatcctcgcatagcacctctccttcgacgccagcctctgcaggtaaccgtaacatacgataggaggaaagacgagaacacccacgcaggccaaggtcaactaaaggcttctaaaaacaaaatctgtaaactgcccgtaaggaagtagcctggaagcttccaagtagccttggggggcgggagcggggacgggggagatcttaaaatgctgaggaaatactaagcgaggtttcaggtgacaaaggaaagagaaaataccacacaattttcctaaattagctaattagtaaaatccatttgagaaaaggacttgagattcaacctaaaatgaacatttaagttccctaaaaagtatagtgagaatggaaatggactagagctgttaagcctcaaaactagccggaatgccctgacaaagagagggggtgccttatgcgttgaaacctgctctaaatatggctaaagttttgcaataaaacatactttctactataatttgtgtttggcaaaatagaatgccccaaataaaaaaaaaacagtattattacctattaggaaacttctgtctggcatggtggctcatgcctgtactctcagcccagcactttgggaggctgaggtgggagggtagtttgagcccaggagttccatgccagcctaggcaacatagggagacacacctctattttttttttaaaggaaacttctgtatgtaatcatttcttacatgtaaggtgagataatgccatctgaaaattttttaaaaaccaatattatgcttttaaaaataacactaaatcactagcagcgggggacatagaaaatcagcgtctcggttagggtaaataaatgcactttggagggcctcagtagaacacctctatgcttgtcttacaccttcattttctgtaggtttctagaagcttagcggttcactggggtaggctgcctgcgttggccagtgcagaggaccgatggcacttgcaatctccctctctagatttatgacgctgcaatctccttgtcgaagtaatggtacatttttttttcttttattgttggcttttgcctggttttttttttgtttgtttgttttttgttttttttttattttttatttttgttctgcagataaatacaaactaataaagagacactaattctacttttccactttttttttttttttttttttgagatggagtcttgctctgtcgctaaggctggagtgcagtggcgccatctcaggtcactgcaacttctacctcccgagttcaagtgattctcctgcctgagcctcccaagtacgtgggactacaggtacatgccaccttgcccggctaatttttgtatttttagtggagatgggggtttcactgtgttggccaggctggtcgtgaactgttgacctcaggtgattcgcccgcctcagactcccaaagtgctagagttacaggcatgagccaccatgcctggccttactttttcacttttaatttttgtactaagttcttctgtttgtttagtgatataatgcaaaagtgatagtattgtcattttgataaagtcaaatttaagcaattaatccaacattttgcatatttggttaaagaaaaacatgattgactttaaaattcagaagctaaaaaaaattaagacaagatctacttgttttaaataggaaaaggaaaaactatatcgtcagtatgtgtgtatatttaaaaagaaaaaactgtatctccaatatgtgtgtatatatgtatgtaattgtgtgtgtatgcagtgtgtgtgagaaagtgtatgcaaacaagtcttatttgactgtagcaccttattactgatattctctccagtcatatatcatggtcaagcaagatgcattgctctaaaaacgtaaaagacacaattgcaaaattgttcgtacttccaaatttgcatccataaactttccaaagttgcatcatttttgcatagtgaaatgtctttgtaataaacacactaaaagaaattgtctttggttttgcagttcagatacagcagttagcctcctagagcctaacaaagtttcagtgaaagttagagccctgaataatttagagaagcatgaaaacaatttagctttcctacagcttgttctgtgaacctcaatgagaacctgtatgaaagtcggtgtttttttgttgttgttgttgttgttgtttttttaaaaaaaaaaaaaaaaggtgaggggagggagtagaattccttgttgaaaacattttgggaaacattttatatcctccctgttggagactcacaacatacattaacatattaaagactcttaaatttatgcttaattgattttcaacaaaggtgccatggtaattcaatagagaaaggatagtcttttcaacaaatggtgctaggacaattcaatagccacatgcaaaaagatatatttaaacctttgcctcccacatcatactcaaaatttaactccaaatgaatcatagatctaaatgtaagagctaaaactgcaaaactcttaaaagaaaacataggcataaatctttgtgacctttgtaggtacaacaaagcacaagcactaaaaaaaattgataaattggactttgtcaaaactcaaaacttctgtgcttcagaagacaccattaagaatagtgaagagaaaaaccacagagaaaaaacatgcaaatcatatctgattaaggccttgtatctagaatatagaaggaactcttgcaacttaataataagaaaattacccaattttaaaatgggcaaaaatttgaataaacatttgggtaaagaagctatatgaatggtcaataaacaaatgaaaagatactcattattggtcatcaaggaatgcaaatagaaaccacaatgagatactactacatacccactaggatggttagaatcaacagacaatgacaaatggtggtaaggatgtggagaagctgggactctcacacactgtcagtagaaatgcaaatggtgcaaccactttggaaaacgtgtggaaatttctttaaaagtttaacataagttcgccatatgatttacaattccattccaaagtatatacctaagagaaatataaaaatgtgtgtccacactaaaacttgtactcaaatgttattcacagtaccacaaagtgaaaacaacccacatgtccataaactgatgaatggataagctaaatgtggtatacttatatggaatactatttagcaataaaaagcaatgaagtattgatacatgctacaaaatggatgatcctcaaaaacattacgctaagccgggtgcagtggctcatgcctgtaatcccagcactttgggaggctgaggcaggcagatcacctgaggttgggaggtcgagaccagcctgactgacatggcaaaaccccgtctctactaaaaatacaaaattagccgggtgtggtgacacatgtctgtaatcccagctgaggcaggagaatctcttgaacctgggaggcggaggttgtggcgagtcgagatcgcgccattgcactcccccctgggcaacaagaacgaaactccatctcaaaaaacaaaacaaaacaaaacaaaatcattatgctaagtggcggggcagagtggctcatccctgtaatcccagcacttcgggaggccaaggtgggaggatcacttgagcccagaagttccagcttgaagtgggctatgattgcaccactgcactccagcctgagtgacagagcaagatctattgtataagtccatttatataaaatttctagaaaagagaaatctataaagacagaaagtagattagtggttgcctggggctggggtgaagaatagcgagtgatggcaaatagaaacaaattttttttgagggtggtgaaaatgttttaaacttgaattttggtgacgattgcataagtgtaaatacactaaaaatcatttaattgttcctttaagacaagtgaatttcatggcacataaattatacctcaataaagttgttatttgtttagaaagaaagggtgttctcttttcaaacaatttgggaaacattttatatcccacttcttggaaagtcacaacatatattaacatattaaagaacaagcaactctataataaagaaacctatttaattttaaatccagcataaaccaaatttatgtgaccacaagaatttttttaagttatgccaattacacctcttcaaaatgagcattaagggaaaaataatcaggagctgctgaaggtagtttgtttcactctctgtcccttaacttctctcttttttttttttcttttttttttgaggtggaatttcgctcttgttgcccaggctggagggcaatggtgctatctcagttcagtgcaacctttgcctcatgaattcaagcgattctcctgcttcagcctcccgagtagctgggattacaggcgtctgccaccacgcccggctaatcttgtatttttcatagagatggggtttcaccatgttagtcaggctagtctcgaactcctgacctcaggtgatctgcccaactcagcctcccaaagtgctgggattacaggtgtgagccaccacgcatggcccccttaacttctctaagcccttaagtccaagaaaatggcatatactttactaatctctgaggtttttttttttgcaaaaataaatgcaatttatataattaatgagtccatacacatcagtaagctggagaggtcttctcacccacccgtcactgccattgtatatacaggatttctgctggggtgtcaggctgagaggctgagattaaaaagtaattgtcattgaagctgaatgtaattgattacataatttgcagttgttcaagattaattcaatgaaaattacatcataaaattagggcattaacaaggattactgtcaaaaggaaagtaggtgtgaatcaagcaactgacttatatatgactcatacccaaaagcaccctgggttcatatttggatcatatataacagttgaatgacaaacatgtcctcactagatgtaattagggaaataattgatgcaaaccctacactacacaattctcatcatgggaaccacagttggaaaaatctggaagcccctgatgtgtgtgtctgttgttttgtatgggggtggggtcattgttgcagaagaaggtatgaaaaaattttgatcagaattgttacataaggaaggagaagcagaatttttaaaaatgcattaacaagtaagatgtgttctgcaaacaactctcctaaacttttttgtcagacaggaatgattgtggggatgagaaatggatgactgatttattatacccaattgattattttttttttttttagcagaggattttctggtcactggaaaacctactagacgaattctaaaagagctgtaacacttctgattgttttaatgtaaataatttcttatggctatattaacaaagaactattacagtcacatatatggattttttttttttttgaaatggagtctcactctgttgcccaggctggagtgcagtgtcacgatctcggctcactgcaagctccgcctcccgggttcacaccattctcctgcctcagcctcccgagtagctgggactacaggcgcccgccaccactcccagctaattttttgtatttttagtagagacagggtttcaccatgttagccaggatggtctccatctcctgaccttgtgatccacacacctcggcctcctgaagtgctgggattacaggcatgagccaccaagactggccaaggtggatttgttaataaaatgatactttttaatgatacttttgggaaaaatattggcttctatcaaggcacagattatgttattagccccttgtctttattccaaatatatgcaaataatgatactgatataagcccaaaagatgccagacagaatttcaggatattggttttcatatttgggaaatgaatataaactttcgatggaattatttggatatatgctgggtagaaggcaaaatgaacattataagacaccattttaaataactttggcatcaacctatcagtaattacttgtaactagaataatcttttaaatgaaagtgtgtatagaagaaagccagtgtcacccacgattaaacttttttttttttagaaactgatgtttattttccatccaccatttttccatattgcttaagagcctatgcaagaacagcttaagaccattcagtggttgctcctacccattcagtggcctgggcagtgggagctgcagaccagtcttccgtggcaggctgagcgctgcagtcttcagtagggaactgctgaataggcacagagggcacctgcacaccttcagaccagtctgcaacctcaggctgagtagcagtgaactcaggagctggagcagtcctttcaccctgaaattcctccttggtcacagccttttcagcagcaggctgctcttctttttcaatctcttcaggatctctgtagaagcagaaatcaggcatgacctcccacgggtgttcacgggaaatggtgccacgcatgcacagaacttcccaagccagcatccaccacatcaaacccactgagtgagctcccttgttgttgcatgggatggcaatgtgcacatagcgcagaggagaatctgtgttacacagagcaatggtaggtaggttaacataagatgcctccgtgaaaggctggtggtcagccctggggtcagtaaccacaagaagtcgtggctcctggaaggctgcctggatctggttagtgaaagttccaggagtgaagcagccagcaattggagtggctccagtggcagcagcaaacttcagcacagccctctggccagtattcctggatgatataacactgacatcagcagggttttcaatggcaacaatggcacgagctgccagcagaagcttctcccaggtcctcttcagatttatgatgtagataccatcacttttccttttatagatgtactgttccatctggaagtcaagattggtgccacctaagtgggttcctgctgcaaggaacttaaggacatcctcctccttcatttgcaggacatcaagggctccggacattgtgaaagtttccctttaagttacgacgggaatccagaacaacgccgtatggacccctctgtaggtagcgtggaaagcgattgaacttgttaaagcaaggtgagaaaagcaagaacttttggatactctctaaaaatctgaatttgtgtttcaagtacagatgtaaattacagcttaataacatgcttatgggagaagagcaagccaaaagggctgcaggtatgcaactccagaccactctgaaaacccaaaatgttttagaaagtcaagataacttaacgccttcctgctagctgcaccccctccaggttaatctattttttattcataatctatttttgttctgtatcacgcttttttgtaaagtttgtggctcaattacttctattttccaaattctacttccccttcttactggctttcctttgctagttttaaggttttcccctcaaaaccagggttacctcacctctgatggcaccccatcttcatatattcttcacaactcttcaggtaaactggatcctcgttttctcaaaaacagctttgcaattcctgatgtgcatttgctatcttataaataaaaaagtaaaatattatttgctcctacttatacacaaatgtttcttattaactccagattggatgaatagttgaggattttgaagaagttaggtggagaattcaggcaaaggctctttttaggaaaaataggaatgggaatagagcctatttgtgaggtggctgtgtccacctggaagccacttcttctatctgcatagatatgataaaggaaagacccaccccatcaagactttctccatatttatgtgtcatttcctttcagcctatagctcaaaatgatctctgttctctcctgctggattcaagcatcattaagtacttagcaattgttttaaataattttgaataataataatataatcaccttcacggaacatagagaaaaattagaaaagaaaataaaatcacccttttttccgctaccctaaagcaatctttgtcagggttttaatacatttctttcctttttctatcaacttaaagatctcccctgttgccaaaagttcttcataatcataatttataagctatgcataatccaatatttttgaaatatttaattttttgacattttaaaatcacaatactgtgatgaatatctttctgcatatactttatcaatatttggggtttaataattatcttttattaaccttagctctccaggactcaagcaataggacaaagcatgtcttgacgtctatttattccaacttcatataggagggtatcccactgtcagcaggtagaaatgctagcatttgttcatttggctgtctaaaggaatgcagtcttgttagtctaagccaaagaccgttgtgaacttgatggatgtcatttttatttttttatcattattattattattttattttgagacggagttttgctcttgtagcccaggctggattgcaatggcgcagtctcggctcactgcaacctcagcctcccaggttcaagcaattcttctgcctcaggctcccgagaagctgagattacaggcatgctccaccacacccagctaatttttttgtattgttagtagagacagggtttcaccatgttggccaggctagtctcaaactcctgatcccaagtaatccacccacctctgcctcccaaaagtgctgggattaaaggcgtgagccactgcacccggctgatggatgtcacttttaaagaaaaaataggtagtttggcttaaaagggaataagggggaaattcacctctaatagcgttttgttcttaataaaaaatactttacatttaatcttcattaaaggaccaagacaatgttattcaaggttatatgctgcagtgttttaatagattgaaagggttgataacttaaagttggtttcttcaatctcatttttcattgtttcctcccaaataacgtatttcattgttaatataaaagtgcactgttgtactcgcaaaagaacttggcagttcataaagaatgggaaaaaaacatatgcaaatctttgccaatctccaagtcccttaaggttaatttaactgtcacaagtaattttccaagaaagaaagcagcctgtgtccatgaaccagccagttaactcatctacacttgcagcgtgcattttcctcctgtgtaattttttcatcacagtatgacttactgtgtcagaagcattgataaaggtggcaaccacgttctgttcacactgaatatttgggcaaatctttgagcaaatcttgaagtcattctgcagcaggtaatgggtccttcatcacaaattcacaaatcaccagcattagataattacactacccatccataattcttttgttaagtggcacgtccatgcaatcaccgtacatgattctgaacacatcagtaagatactagggccaggcgcggtggctcacgcctgtaatcccagcactttgggaggccgaggggggcagatggctttaggccaggagctcgagaccagctggaccaacatggtgaaaccccgtctctactaaaaatacaaaaattagccaggcgtggtgtgcatgcctgtaatcccagctactcgggaggctgaggcatgagaattgcatgaacccaagaggcagtggttgccgtgagctgagatcacgccactgcactccagcctgggtgacagagcgagactcagtctctctctatataaaataatatatattcagtagttacaattatgcatatatattcagtatatgtatattcagtaaatagttacaattatacatatatacaacattatacatgtacatatacacatatatacattatacatgtatatatacatatatatatagagagagaagaagtgtttgccacgatcattctgtaatcacttaaaatattttttctgcctcctcaaaaaataaactctgtgcatcacaaatacatttttaatgtttctgcttgaaattagcaggttctaattaattttttcagggtgcatttggggtcatccttcttgttctaatcctgcttccatctgaccatgttgtttcgcactgcaccaggattaagaaacaagaaatagaatggatggctctgggcccctaacccttccctccatttccactggcatgtgaactcacggtgacctgttctggttatctcttgctgcataacaagctacctaaacctggtggcttaaacaaccatcatttattttgcacatgcatctgcaatttgggcagggctctgcggggacagcctatttctttccatgcagtgtcagctggtgactcaactgttaggggctgcaaccatccgagtcccttacatatctagtagttgatgctggcgaatggctggggcctcagctgaggctgctgctggctggaacacctgcatgtggcctttccatatgggatcttgccttccttacatagtgtttggatcccaagaatgtgtcccaagaggataaggcagaatgtatggcatttttacgacccatctttggaagtcatatggcatcacttccagctatatacactgttgatcaaggcagtcacggagactgcacaagttcaagcagaggggatatatgccacactacttgatgggaggagtgtcaccttctcattgtacaagtagcatgtgaaatgaaatatattatggtggctatttttgaaaaataaaacctacggtcgctaaataaatcagtcagatgtaaaatattcattgaaaaagacttgcttttgaaagtatttgtttacccaggtatttagatactaccattggtatctacataccattatataaaccttgcagtatctcagggatagtactcgtatgtgttgaatactatgctaggcactagggtccaaagagaaaaggcattattagccttgcccacaagaagtgtataatctactgggagagacccttcagtaaatagttacaattatacatgataggccgggtgcggtggctcacgcctgtaatcccagtactttgggatgccgaggcaggtggatcacttgaggtgtggagttggagaccagcctggccaatgtggtgaaaccccatctctactaaaaatataaaaaattagccaggcgtggtggcgcacccctgttatcccagctacttgggagctgagacaggagaatcgcttgaatacaggaggcagaggttgcagtgagccgagatcgtgccacttaactccagcctgggcaacagaacaagactctgtctcaaaaaaaataaaaaataaaaaattaagtgtgataaatgcaataatgtagataaatattgacatatatatgaaaagaacactgcatctcattctgtctgagtgaaacacagatgccttcataggggaggactcctttatgccagctctttcaaattctggtaataaaaaaggggggaaatcatttatattgaaggaagggggaattccactgccatatttctaatgtaggcaccaacttcaaggcaattggaaataaacgaccttgcacttggaatattctggttgcatcttgagttcaaattctgatgtatctcagtaagtcatgcctgacttagcaatgctttaatgtcgcacaaaagagaatcactcattaaaaacgataaattattatgtaataggaaatattataaacatgataactctaaatacctgacagatttccatgaaacaatttggtattggtttccaaacaattatttaccaataaatatgtattgaatggttatttgccattgttcttaaaatgcattggctcttgaatacaaagtgttctttttttttgtttttgttttttgttttgagacagagtctcgctctgtcgcccaggctggagtgcagtggcgcgatctcggctcactgcaagctccgcctcctgggttcacaccattctcctgccccagcctccctagtagctggcactacaggcgcccgccaccatgcccggctatttttttgtgttcttagaagagacggggtttcaccgtgttagccaggatggtctcaatctcctgacctcgtgatctgcccgcttcggcctcccaaagtgctgagattacaggcgtgagccaccgagcccggccgcaaagtgtttcttaattactcctaaaacaaacttaagccatatctatgtgagaacaaaatagatgtttttggataaaaagtaaacatccaaatcctttttcaccttctttttttttttttttttttgagatggagtttcgctcttgttgcccaggctggagtgcaatggcttgatatcggctcacctcaatctctgcctcccaggttcaagcgattctcttgcctcagcctcccgagtagctgggattacaggcatgcaccaccaggcccagctaattttgtatttttagtagagacggggtttctccatgttggtctggctggtcgcgcactcccgacctcgggtgatccgcccacctcggcctcccaaagtgctgggattacaggtgtgagccaccatgcccggcctcatctatgtgttttaaacatagatgagatcattttataaatattgctctgaatcttttttacttacaaattgatgatgggtatcttcccatgtcagttcacatagttccacttgatcctttttaacatgtcatgatgctatgtttgtaccataatccaaccattctctatttatggatgttaaaacgtttccattttttcactcttacaaatgatgccacagggaccatgcatatgcattcaataaataatctaatcaataagaaatacaaaaaggaaatatacagtaatattaacaatgatgttgctgggtgatgaactgtgagttgttttgacttttctatattttccaaaattttattttgttagtaatatgaaaaatagattctggtttttaaaaagatatcaatgcatcaggctgggcatggtggctcacgcctgtaatcccagcactttgggaggctgaggggagcagatcacctgagatcaggagttcaagaccagcttggccaacatggcaaaaccctgtgtctataaaaaatacaaaaattagccaggcatggtggcgggcacctgtaatcccagctactcgtgaggctgaggcagggagaatcgcttgaacctgggaggcggagactgcagtgagctgagatcgcgtcactgcactccagcctgggcgacagagcgggactccatctcaaaataaataaataaatacaacaaaaagatatcaatgcatcagatgcataagatagccagaaacaggttacttattatataagttggtttacatttggttttaattctacttcccatttcaaaatgtttgtttctaaggggagtcttccagacagaagcttcctgattggcctactcttcactctgtttttactccaactgggcaaacaatataggagtgacagaaatattttgggtaaacagctaagaacaggttgaaaatgccttccttatttggatagcttttaaagaaataccttcttgcttgtgggtttatctactggaaagctcattttctctttgaaaagcgcacactttgttagaagtcagcacagcagttacctttggatggggaaagggttcctgggaataatgggcttccaggatgctggtaatgttctgtttctgtacgtaaatgtagaatttacatacagatgtgctcaatttatgaaaattcatcaaactgtacaagtttgatgcttgcattttttaatgtatatgctattcttcccttacaagttagaaaacaaacaaacaaacaaggggccatgggaaaaaagatgctgtagttttggtgggtccaaagaaatccatgcaataaagggatgaagcaaggggactggtaatttagggagtactttcaggacaaaatgttatcaccctaccattcaagaaaatgagaaaaagcagctaatggcgaaatttccaccatatcaaatgtcttttgcttttaataaatataataatattgcaggctttgtctattattcctttattttatccataaagtggtcaccatgctagtgactttcttttccaggtcaatcctggaaacctttgtctaccaacaccttaacgcattaattaatgatgccctgtctctgcctctccactggttcttttctctcaacctgtaaaaatattcaaatctcttcctatcccggaaaattcctccccacaaccaggctccttcccaaacatttaccctcatttcctgtcatttcctctcctttcaactatcccttaactgcatgcaactcaaaaatattatgttggtctattacattatttaattgtattgtaatcatgtatgtgttacccacacccacatcatcagactggaagcaggaaagaggctattcatcatcgtattatcaaaccaagtaaaatgcctttctttctaaagactgtgtttattgttaccactaggaaactcttgagtaaagagtttcttatatcacggcacccccagtgccatgatataagaacacacttgtggccagtcatggtggctcatgcctgtaatcccagcactgtgggaggccgaggcaggtggatcacctgaggtcacgagttcgagaccagcctggccaacatggtgaaacccgtctctactaaaaataccaaaattagccgggcatggtggcagatacctgtcatcccagctactcaggaggctgaggcaggagaatcgcttgaacccgggaggcggaggttgcagtgagctgagattgtgccattgcactccagcctgggcaataagagtgaaattccatttcaaaaaaataaaaataaaaaagaagagcacacttgcctccttcctcactccaccactatctcccttggtgtttaggtctcttctgattcaggttccctaagacagcccactgctgcgcacccaacaggggaggaagtttggtaactttaaacaagcgggttagtcctctaaactctggacaagtagaaaccacatttctcctgctcaccactgtattcccagtaactggccaagtgcttgactcctggcagatgcttcataggtattcctctaataagtgaaatgaggaatgaatgaattagtgaaaaagaagtgtagaaagtgaatatgaagtagattagaaaagcttcttgggctggtgcagagaggacatttctagctttcaccttttgccacactttagagcaatgtttttcaaactactcattaagactaattagtaagtgggaaaaacaattttgtgagtcacagctgagttttaaaaatggaatagggtagctcacgcctgtaaccccagcactgagggaggtcgaagcaggaggattgcttgagcccagcctgggcaacacatggagaccagaccccccaacccggcccttgtcaaaaaaaaaagcaaacccaggtgtggtggcaaacacctgtggtctcagttgctcaaggaagctgaggtgggaagatcacttgagtccaggaattcggggctgcagtgagccaaaattgtgccactggactccagcctgggcaacagagcaagaccctgtctcaataaataaataaataaaagttaaatataaaaaaatgaaataggataaaacaaaacaaacaggagaatagaataggatttcagacagaaaaatggaatgaaaaaggaaagaaaatatcagtaaattgcaagtggtaagggaaagaaatatttaatacaactttttcttagttatatgtatacatacatacagaatgcctgttctagattcctatttgcaatatttcttatgtgtatcagggtcaaaaaactggtaagccactgccctagtagcctgtgaaggatagagttaatggagcttcaaaaggcagataaccaggagagaattagcttatcataaagatcagcaaagtttgagctgcttatttctttattattttttgttatcttttggtatttttggcagcacaaagtcttctaaacaagttaatcttcaactcaaaggcttagttcactttgaaatgtccagaaatctttcttgaaatagtggaagataaattatctgtttagaatttattacagtaccaattgtcacaaaagcacactttacagggctcactgcagaaatagcatgcactatttctttctctttgtcaaaaaattgagttttaatatatttcagaaacatatacatggaatttgataaagtttcacaatatttttgcttgtttcttaattctttcaacatgtttctcagggttgggtctgcctttacattttcttaattcactagcagtttcttcagtttcttaatgaaatagcactggtttgtatttttattttattttatttttaaagtttcttttcttttcttttctttttcttgaggcagagtcttgctctgtcacccaggctggagtgcagtggcgccatctctgctcactgcaacctccacctcctgggttcaagcgattcccctgcctcagcctcctgagtagctgggattacagctgtgtgccaccacacccggctaatttttttttttttttttttttgtatttttagtagagacagggtttcactttgttggccaggctggtctcaaattcctggtctcaactgctatgcccaccttggcctcccaaagtgctgggattacaggtgtgagccaccaggcccagcctgtgttgttgttttttttttttttttttttgagatggtgtcttgctctgtcacccaggctagaatgcagtggtgcgatgtcggctcactgcaacctccacctcctgggttcaagagattctcctgcctcagcctactgagtagctgggattacaggttcctgtcaccaagcctggctaatttttgtattttgagtagagacagggtttcaccattttggccaggctggtctcgaactcctgacctcaggtgatccacctgccttagcctcccaaagtgctgggattaaaggcgtgagccactgcgaccagccggcccagcctgtttttatgttatatatctaatttcgtagccttatttccagtcaaattgagtgggttacctttattatgatcagttcactttgattttctttgaccatgctaacctttagctgaaagttatagaacctgctattggatcttgctctggacaccgtatctggcaagaggcaattcccagagccctagctagagatgagggattacatcatcagtaaggtaggggcacagtgtactctgaacattcctggatgacatgcttgcctataaaggcaggggtgggttagaatgggaggaaggatgacgtcaaagagatcttgaaaaaaaaaacaaaaacgaaaaaacaaaggtatctcgctagtaggtctcttggctttcaggctctgtcttacagcaagctgtttgagtccaggagttcaagaccagcctgagcaacatagcaagaccccatctgtacagaataaatataaagattagctgggcttggtggtgcatacctgtggtcccagttactctggaggcttaggtgggagaatcgcttgagcccaggagttcaaggctgcagtgagccatgatcctatcaatgcactccagccagggtgacagagaccctgtctcctaaaagaagaagaaagaaagcagcttgaagcagaaaagacaaggaaccagaccagaaaggtaactctaaatactttcaagtacctaagaggccagtttcgtgaagttttctcacaatcgtagtaatcataaagggaagatgagggaacattggcctcaggtgcagtgagaggcccatcattggaggtatttaagtgcaggccacgtgatcattatctgagctgtgagtaggagaatgccagcactgggggtgggggagaagcccacagctatatggcctttttatctcctagatcctatttctagaagtcctcccagaacaaacaagcaaaaggcattctgctatggcttgaatgtgtcccccaaagttcatgtgttggaaacttaatccccaatgcaacagtgttgagatgggggccacttaagaggtgattagaggctgggtgcagtggctcatgcctgtaatcccagcactctgggaggctgaggtgggcggatcacttgaggtcagcagaccagcctggccaatgtggcgaaaccatgtctctactaaaagtacaaaaattagccaggtgcagtggcacacgcctgtaatcccagctactcgggaggctgaggcagaagaattgctggaacccaggaggcggaggttgcagtgagctgagattgctgccactgcactccagcctgggcaacagagtgagactttggctcaaagaagaagaaagaaagaaagaaagaagtgattaggccatgagaattctggcctcatgaatggatgaatgttgccatcacaggagtggcttgttatcgaaagaggggcttataataaaagccagttcgacccccctgctctctctcaacttgtgatgccctctgacatgctatgatgcagaaggccctccctagatgctggccactcaaccttgaacttctcaacctccagaactgtgagaaacacatttcttttctttataaattatccagtctctggtatacagcacaaagcagactaagatacattctgactccctggcaccactcagggccagagtcatctgttaaagacctgatgctactcagggagcttcctgacagccagcaattttgacagcgggatagggtaaaatgcctcaaggaaaacacagacaccaattctttttggccttattattttcttcttgtgctttcagagacctctttgagaaaaaggattgaactctgcaaacattgtccatggaagccctataaagatagggctttttcaaggaggtggaaaaaggaagtcgttgttcaatagggacaaagtttcagattcacaggaagaaaaagttctggagatctgtttctcggcaatgtgaatatacttaacattactaaactgcacacttaaaaatggttaagatggtaaattttaggttatgtatttttttaaccacagtaaaacaattttgtgtgttttgaaaaatcttatttcagcaagaaagctagataaactatctcttaattactcttcaatactccctagttgcaacagggattacaaatcaaactgagtgtttcaaatttctgggccatgtggttcatcctaataatagtaataattataataacccaggcacacaggagtttaatggtcttatccaagttgcctgagtacaaagcgcaattattaacctcacctaataaacatccagagatgcacgtagtccatgggttaggatgcaattttaatgctcaatattaaacaataacgggctttgagcttcaaaggaaacttggtaaattttataaaatatagaatatggcatagttagtgatactttgatggtctgtcacttaagataaaagagattaatgaatgtaaattagaaatatttcccagttctctagattgaggcttgccatgagagttgaaaaatttcattttcacaacatgtgatttaatgagatgacatacatagaaaacacacggcctatcaccagacatggagcacagctttttgtctcttttatttcataatgtacctagactagtacttggcatagtagatactcaatacacatttgtttagtaaatagcaagggctcaataaatgatagctaacaatgatttagattccaacaagaaagaaaaatgctcttaatggataatgtggcaaagctgacaacattggaataaattgcaactcaagatatttcacgaaaggaaatagttgctaaaaattcagaagcaataagaaagacagtgaaatctatgaaagataatacaaaagaggcagcttgtggaaacccaaggacggggcaataggtgggcatatactatgtcaatagatagtagtctcaaagtaaagcatgtggttttcagatgtccccttttctctgtgactcaatttatccaatattaatttaacacacatttaataagtaccaggtgctgtgcttgccctgaagatgcgaacatgtgtaaaatgaaacctaggccctgtcatttaaggagttcacagttaagaaggaaatgcagacacaacaaaatataatgtaacataacataatgtaatataagtggccacacagaagaagagtgtgattaatattgtcctactggtcaaaaaaaaaaaaaaaaaaagaaagaactataaaaggctgggcgcagtggctcacgcctgtaatgccagcactttgggaggcccaggcaggtggatcacgagatcaggagatcgagaccatcctggctaacacggtgaaaccctgtctctactgaaaatacaaaaaattagccgggtgtggtggtgggagcctgtagtcccagctactcgggaggctgaggcaggagaatggcgtgaactcggaaggcagagcttgcagtgagccgagatcgcaccaccacactccagcctgggtgacagagtaagactcttgtctcaaaaaataaataaatatatatatatatatatatatatatatatatatatatatatatagtcctactggtgtgagggatagaaagggcttcagagtgacagtctgccatgcagataattaaatagtagaaaaaaagatagatgaaaaggaaaagaaatatatgactattactgtaaaataataacgctaagaataataagcacctgtcacataccaggcactgtagcaggcacttgaagtgcattatatattacatgatgcagtatttttattgacatgtgaatgccatagtaaacaggaggaggatctgacctggtagaaagggcaggggaggaaaggtggaaagcaagttgccaggcccaatttccactcctttgcttggatcctcaccacctcccttcccccagcttccctctgctcactttccccttctccagagtcttaggtattatgcagagcctgaagccccctccttactcgttctatctggagaggttcaggccagaaaaacggaggcatccagtccagggaaagctgcatgggggtcaaactatagaagataatgacagtgattctcactttttattttattattattattatttatttattttgaggcagagtcttgctctgtcgcccaggctggagcgcagtgggacgatcttggctcactgcaacctccacctcccaggttcaagcgattcttaggcctcggcctcctgagtagctggatttacaggcgtgtgccaccacgccctgagatttttgtatttttagtagaaatggggtttcaccatgttggccaggctggtctcgaactccaggctggcctcaggtgatctgcctgcctcggcctcccaaagtgctgggattacaggcatgagccaccatgctggcctttttttttttttttttttttttttttttgattcttactttttaaagtctcagatgaaaaaaaaaatgcatcagccatcgttcaggtccaacattgcaagcactccctctgtgaacatacatattctgtagaaatactagtaaatgggcactggcaagttattaaagaatccacatatatcaattacttgcccacactatgacaaactggggaagaggtgcataaaccgtgaggaagcttctccagctttctacaatagcttccggcaagcctgaggccagggacgaaggattctacagtcgtgtttaactacaaagcttatctccctcttcctccacatcatttacttggtaattaatcaggaattaatcatagtcttacaattaaaagcatgatgaattcttgtcttgcaatgctttcactactaactaaatttcctattgttacttttacccgcacctgaaggtaaggagaacctcccttggcttcttgtatgtcttttctccacctaggattctgcatacattgttggagctcaaaaaaaaaaaaaaaaaaaaaaaagagacattctcaacaggtcaatttatggtagagatattatgtgtggtatagcgatataagaggatgtgtgttgcaagcttagggcagcggctcttagacttgagcacattgcaatcccttggagggcctgctgcaacagactgttggggccccgcccctgacccatcaccagtgggtccagcaggtctgggtgtggcccaaggatgtgcatttctaataagtttcaggtgatgctgatgccctctttgaaaatcactggtttagagtaattcaatttagctgtcatttaatccagaccaaaaaaagccattcaccttgtttagctgccgcaactgactcatgtgtcaaggaactcagaaatccaacttagagatcacaggtcaacctgtgcaaagcttgcggcttctctttaccagctgggagaaacacctaaccttccttctcacaatactgtgcagggattaacacaccaacaccaactccaccaccttgattctcgcctcctttaacccaaagggatccagggaaggacgctgattggccctgcttcagatacatacccaccaatctggagcgccggagatgagctgctgcgattggccagatccaaaggtgggcgtaagaaggaaatgttctggggaaccaaacaccgtggctaccacccgtgcgttgcaaaaagacagaagcagagctgtggtgggattttttctttcaagtaaactttttaattgaagtataacacacatacagaaaagtacacaagtggtaagtatagagtttgatgaatgtttacaaagtgaacacacccatataagtatcaccaagatcaagaaataaatcatgacgtttggagttttaaaaagtacacttcggtcttaatggcttcatttcagcccctttcagggcagttttctacatgtgctaactcatttccacaaaatagataaaatataaccaccagtgcttgtaatcaaagagtaagtcaaagcataaattcagccctctaaataacgaattaaatgcagaaaccttttggttttcatgactcttctctcatgataagagagcttttctttaaaaacaggaaaggctgtccagcagtcctcagaacctgtgtcttctcaccattcctcaatcacttgtcagctttttgtttccacattctgggatcttcatcttcttattctatgctgtgtttatacagtgctatggaataagccagtggcttaataattattgtaattttgcggtcttaattatgttttcttaactcagaaatagtcactatatcaaatgatgttaattccaataagttttagtaaaagggaaataggtgaatgtttgactccaaatattctgtaattatgtaaaagtaattgagctcattgctgaacatttgaaaataaccaaaatacaaagaaactgaaaatcatccatgctcccaccactcaggaataatcactgcaaacattatgatc

SEQ ID NO: 310 - DNA, 31737 bp, Homo sapiens
gaattcattaaaaatttttttacggaaaagctcaaatttttcattttaaaatatttctcttttttcttttttcagaacatttctcacttacataagagcacattttctttctctttttttcagatagagtctctttgtgtcacccaggctggagtgcaatggcgtgatctcggctcactgcaacctccgcctcccgggttcaagcaattctcctgcctcagcctcccaagtagctgggattacaaacggctgacaccacgcccagctaatttttgcatttttagtagagacggggtttcaccatgttggccaggctggtctccaactcctggcctcaggtgatccgcctacctcagcctcccaaagtgctgggattacaggcatgagccaccgcgcctggcctttttttttttttaaaattccaacttttattttagatacagggggtacaggtgcaggtttgttacatgggtatattgcactaggtagtcatagaaccaattaggtaattttttaacccacactccctccctctctccccttctagtagtcttcagtgtctattgttcctatatttatgtccatatgtgctcaatatttagttccgttataagtgagaacattaggcatttggttttctgttcctacgctaattcatttaggattctgtcctccagctccatccatgttgctgcaaaggacatgatttaattttttttttttatggctgcaaaactatttatctttcacttcttggcttttaccaaaataaaatgtttcttttgaactataaatttataaaacatctcattgttctctgtatcataatttttttctttttttttttttttctgagacagagtctcactctgtcacccaggctggagtgcagtggtgccgtcttggctcactgcaacctccgcctcctgggttcaagcgattctcctgcctcagcctcccaagtagctcggattacaggtgcccaccagcacgccggctaatttttgtatttttagtagagacgaggtttcaccatgtttgccaggctggtctcaaattcatgatctcaggtaatccacccgcctcggcctcccaaagtgctcagattacagacatgagccaccacagccagcctttttttttttttttttttttgttgagatggagtctcgccctgtcacccaggctggagtacagtggcgctatctcagctcactacaactccagcctgggcaaaaggagcaaaactctgtctcaaaaaaaaaaaaaaaaagggcagagaactaatgcccagagtcaacctgcaattattgcagagtgggaagcagtagacagatgctcctgcctcctgtccttcaggtggaaagcgtctggagacattcagctctctcctcaggagggcctgggggaatcgaactccactgcacacaacagtgacatcactctttttttttttttttttttgagacggagtctcactctgttgcccaggctggagtgcaatggtgcaatctctgctcaccgcaacctccgcctcccaggttcaagcaattctcctgcctcagcctcccaaatagctgggatgacaggcacatgccaccacgccaggctaatttttgcaattttagtagagacagggtttcgtcgtgttggccaggctggtctcgaactcctgacctcaggtgatccacccacctcagcctcccaaagtgctgggattacaggcgtgagccaccatacccggccaacatcattctcttaaactggcctttcctccttcaggatctcacactccctatagcctcgcttctgctttctgggatcacctaaattaactacctacggccaagtcctgtctcaagctctgctgtcagggtcaccaaaattaagatcatccctttccatcctcctctccctataaactactgcccttcttccacaaactccttccacgccagcaaacccagactgtaacattaacacagagttataatccatccatatactggtctctccacattcctggagcacaaactgctaaagggtaggaacgctgtgacacgtttggttcccccactgtccagtgggagagagatatgtgagccagtcagcgctacaccgagttgaggcagccattgaggctcttcatgaattttcccgttttctgccttccaggcacatgataggatggaattcctcagccctcctgaagttaggccactgcaagaggcctaactggcttgctttggccagtgaaataagagcagaagtcacatgtgttgttactgtcaggcacaagtatttaactgccaatgtaacacaagacactccagcaccctcttttgatggagcctcctttgatctggatgcctgagtgactatgatgatcagagactctaacactcctactgacccaacagagagcaatagtgagaaataaaactgttgtgttaagctactgagattccagggttgtttgttactgcagcatgatgtagccatcctgactgatacaagctgagataggagtccatataaagttcacagggacacaaacaggggaatattaggtctctctagaagatcagaaaggtttcatcaatgaacttgagatagccttaaaagatgagtgtttacctgacaaggaagagatgcaagcatccaggtgagcaatgaaaccccagagcgcattaaaggaactgcaagttcaggacctttcagggctggggagggaaggaaggccacaatgacactagaccagggaggaaggagagaatgccttatggaagaaacagcatttacagcttgtaaggcgatttgctatatggaattttagataaggaagtgatatgatttgatttgcatttcagaaatattattctggaatcagtatgtaggggctggaagaccagttaagagacatttagagtcctggcaagacaacaggggctaaaagcaagcacagaaatgaggaagggaaagccagcaccaacgttgaggcatagaccacggggcccctgagccctcctctgactctcagaacacctgggtgtcttatcacattgcaccatgactgcttgttcattgtttttgttgttgttgttgttgttgtgatggagtcttgctctgtcgcccaggctggagtgcagtggtgtgatcttggctcactgcaagctccgcctcccgggttcacgccattctcctgcctcagcctcccaagtagctgggactacaggcgcctgccaccacgcctggctaatttttttgtatttttagtagagacggggtttcaccgtgttagccaggatggtctccatctcctgacctcgtgatccacccgtctcggcctcccacagtgctgggattacaggcgtgaaccaccgcgcccggccgattgcttgttcattaactatagtcttcttttttttttttgagacggagtctcactctgttgcccaggctggagtgcagtggcacgatctcggctcactgcaacctctgcctcctaggttcaagcgattcttctgcctcagcctcccaagtagctgggactacaggcatacaccactacgcccagctaatttttgtatttttagtagagatggggtttcaccatattggccaggctggtctcgaactcctgacctcatgatccgcccacctcggcctcccaaagtgctgggattacaggagtgagccaccgcgcccggccactcaggcaggatttctatgtgacagtcttgaggcagaattccttctctgggaaacctaagtctttgctctttaggccacaatatcaagagtaatctcctggctgggcgtggtggctcacacctgaaatcccagcactttgagaggccgaggcaggcggatcacaaggtcatgagattgagaccatcctggccaacatagtgaaacacggtgaatacaaaacttaactgggcgtgttggcatgtgcctgtaatctcagctacttgggaggctgaggcaggacaatcacttgaaccagggagtcggatcgcaggttgcagtgagccaagatcgcgcctgggtgacagagcgagattctgtcttaaaaaaaaaagggccaggcacggtggctcatgcctgtaatcccagcacttctggaggccaaggcgggcagatcacgaggtcatgagttcaagaccagcctggccaacatagtgaaatcctgtctctactaaaaatacaaaaattagccgggtgtggtgcctgtagtcccagctacacgggagcctgaggcgggagaattgcttacacccaggaggcggaggttgcagtgagccgagatcacgccactacactccagccagggtgacagaatgagactccatctcaaaaaaaaaagagtaaactcctttacttaacgtcagctgagtatagatggcaatgtctttgcttcgttttatttttttgagatggagtttcgcttttgttgcccagacttgcccagactggagtgcaatggcacggtctcagctcactgtaacctctgccttccaggttcaaatgattcttgtgcctcagcctcccaactagctgggattacaggtgcctgccaccacacccagctaatttttgtatttttagtagagatagcggttcaccatgttggccaggctggtcgcgaactcctcacctcaggtgatctgcccaccttggcctcccaaagtgctccaattactggcgtgagccactgtgcccagccaagatgtcagtgttatctacaaaatgccctcactgaagtatccagactacagtcaggcatggtggcatgcttgtagtcccagatacccaggaggctgaggcaggagaatcacttgagactgggagttcaagttcagcctggagaacatagtgagagtctatctcattaagataaataataatgcaaatgtgtatatatacagtgcccaagggcaccatagccttgccaaattgacacatcttttttttttttttttttttttttgtggaaacagggtttcaccatcttacccagagtggtcttgaaatcctgggctcaagtaatcctcccaccttgccctcctaaagtgctgggattacaggcgtgagccactgcgcttggcctgacacataaaattaaccatcacagagtcatcaatgtggtaaccaatctctctttttttttttttttcttttttgagatggagtcccgctctgtcactcaggctggagtgtagtgatatgatctcagctcactgcagcctctgcctcccaggttcaagcgattctcctgcctcagcctcctgagtagctgggattacaggcacacaccatcaccctggttaattttttgtattttcagtagagacagggtttcaccatgttggccagactggtctcgaactcctgacctcaggtgatccacctgcctcagcctcccaaagtgctcggattacaggtgtgagccaccgtgcccggcctggtaaccaatctctaaagagcacatggtaccacccagagagaatgagataaaggcctagaaggccaaaggcatcaacagaggaaaaggtcaagacaggaaaggagtgagggtttatagaacagactgaaattatagaaggaagggagcctggatacaggggtgtcatggaaaccagggaaaagcagtggatcaaacagtgtggtcaagtatgtcacagactgcagaaagctcaagtaagaggagcactgaataatatccattaaatttgaagcctttatatcttttttcccaagaagcaacagtctcatggctggtgtacaactgcttcagaaaatagtttagcattagcagggaagctgaacaggtgcagacctcaacatccagcaactccactcttacgaatatgtggatgcttgctactcagactgtggtccacagacagacagcatcagcatcagcaggaacttgtagaaatgcagaatctggccaggcacggtggctcaacgcctgtaatcccagcactttgggagactgcagtgggcggatcgcttgagcccaggagttagagaccagccttggcaacgtagtgacccggtctcaaattggaaaaaaaaaaaaaaaaaaaaagggccagacatggtggctcatgcctgtaatctcagcactttgggaggctgaggcgggcaaatcacctgaggtcaggagtgcgagaccagcttggccaacatggtgaaaccccatttctactaaaaatacaaaaattagccaggcgtggtggcatgtgcctgtagtcccagctacttgggaggctgaggcaggagaattgcttgaacccgggaggcggaggctgcagtgtgccactgcactccagcctgggcaacagagcgagactctgtctcaaaaaaaaaagagagagaaaaaaaaaaaaagaaagaaacacagaatctcaggccccacccagacctactgactcagactccgaattaaaactccagatgactcatgtgcatgctgatttcaagaagcatgtaatcttcaaacccttttgctcacattaaaagaattttgcaaattatgtaccccttgcatgtttttatgctgctatctaaaactttccccaaatgtttagttgcaaaagaatgccattccagtgtgttgtaaacatggatcttttttaaaaagtcttatttcactttttaaccattcccttcatgattcattttatttttttttttatgtatttatttgtttattttttgagacaagagtctccctctgtctcctaggctggagtgcagtggcgccatctcggctcactgcaacctccgcctcccaggttccagcaattctcctgcctccacctctcgagtagctgggactacaggtgcctgccaccacgtctggctaattttcgtatttttagtagagacggggtttcaccttgttgctcaggctggtctcgaactcctgacttcaggtgatccacccgctttggtctcccaaagtgctgggattacaggcatgagccaccacacccagcccaattcattttatttatttattttttattttatttttaagatggaagcttgctctgtcacccaggctggagtgcagtggcacgatctcggctcactgcaacctctgcctcccgggttcaagagattatcctgcctcagcctcccgagtagctgggattacaggcatgcgccaccacgcctggctaatttttgtatttttagtagagatgggggtttcatcatgttggccaggctggtcttgaactcctgacctcaagtgattcatctgcctcagcctcccaaagtgctgggattacaggcgtgggccaccgtgctgggctcatgattcatttttaaagtacatgattataatcttctttaacagtcagaaatttcacattgttctatttcttctgaattcttattttcatagttctatttctacccccaagacattatcctaatgtaatacattttgtgcttgaaagccttctaagcctgagcaacatggcaaaaccctgtctctacaacaaataacaaaaattagctgggtgtggtggcgtgtgcctgtagtcctagctactctggaggctgaggtgggaggatcacctgttcctggggaggtcaagcctgcagtgagtcatgattgtgcattccagcctgggcaacagagtgagaccttgtcaaaaaaaaaaaaatgagcaaagaacttgaatagatatttctccagagaagacacacaaatggccaacaaggacatgaaaagatgctcaacatcattagtcattaagtaaatgaaaataaaactataatgagtacaacttcatatcaactagaatgtctatttaaaaaaaaaaacaagccaggcgcggtggctcacgtctgtaatcccagcactttgggaggctgaggtgggcggatcacaaggtcaggagttcgagaccagcctggccaatatggtgaaaccccatctctactataaatacaaaaattagccaggcgtggtggcgcgtgactgtagtcccagctactcaggaggctgaggcaggagaatcccttgaacccgggaggcagaggttgcagtgagccaagatcgcaccactgtactctagccggggcaacagagtgagacgctgtctcaaaaaaaaacaaaaaacaaaaaaaaacagaaaataacaactgttggcaaggatatggagaaattgaagcttgtgtacaatctcctggtgggaacataaaatggtgcagctgctgtggaaaacagtttggcagttcctcaaaaggtttaacatatagggtgggcacagtggctcacgcctgtgatcccaggctgagaggaatttgggaagctaaggctggaggatcgcttgagcctagcagttcgagaccagcctgggaaacacagcaagacttcatctctacaaaaaaaaaaaaagaggtgggcgggggagcaaatgccatggctcacgcctataatctcaacaatttgggaggccaaggcaggcggatcccttgagctcaggagttccagaccagcctgagcaacatggtgaaaccctgtttctacaaaaatgcaaaaattagccaggcatggtggtgcatacctgtagtcctagctactcgggaggctaaggcgggaggctaagcctgggaggtggaggttgcagtgagccaagatcacaccactgcattccagtctggtcaacagagatcctgtctaaaaaaaaataataataataatacgttaaaaatttaacatataattgccatataatccaacagttccactcctaggtatatatccaaaagaactgtaaataggtatacaaacaaattctagtataagcatccaattaaaagacaatgaatgaattacagctacacaagtcaacaaaaccataatgttgagtgaaaaggccagccccagaacatgtacagtatgattcatctgtgtgatggtcaaacagacaaaactaaactgtccgggaaaacctacaactgcatagatactgaaactattacaataagcaaatgaagtatacacggtcatacctcagagatattttgggcttcgttccagatcccctcaataaagccagtcatatcaacaactttttggtttcccagtgcacacaagttatgtttacactgtactgtagtctattcagtgtgcaatagcatacgtctaaaaacaatgtatgtaaccttaattttaaaatactgtattgctaaaaaatgctaacagtcatctgagtctttagtgagttgtaacatttttgctggtggaggattttatcttgatatcgatagctgctgactgattagggtggtggttgctgaaggttgggatggctttgacaatttctttttttcttttttttttttttgagatgaagtctcatgctgtcacccaggctggagtggagtggtgcaatctcggctcattacaacctccatctcctgggttcaagcaattctcctgcctcagcctcccaagtggctgggactacaggcacccccaccacacccagctaatttttgtgtttttagtagagattgggtttcaccatgttggcccaggctggcctcgaactcctgacctcaggtgatccgcccacctcagcctcccaaagtgctgggattacaggagtgagtcaccccacccagccaacaatttcttaaaataagacaacaatgaaatttgctgtatctactgactctaacttttataaaaagatttatctgggccgagcacggtggctcatgcctgtagtctcaacactttgggaggccaaggcaggagtatcacttgaacccaagaattcaagatcaatgactgggcaacacgggaagacccagtcttgccacttttaattaaaaaaaaaaaaaaaatggccgggtgctgcggctcatgcctgtaatcccagcactttgggaggctgaggtgggcggatcatgaggtcaggagttcaagaccagcctggccaacatggtgaaaccccatctctactaaaaatacaaaacattagctgggcgtggtggcagacgtccgtaatcctagctactcaggaggctgaggcaggagaattgcttgaacctgggaggcagaggttgcagtgagctgagattgtaccattgcactccagcctgggcaacaagggcgaaactccatctcaaaaaaaaaaaaaaaaaaaaaaaagccagaagtggtagcgcacgcctgtagtcccagctactccagaggctgaggcaggagaatcacttgaacctggtaggtggaggttgcagtaagccgagattgtgccactgcaccccagcctggcgacagagcaagactctgtctaaaaaataaataaataaattagtccaggaaggtcgaggctgcagtgagccttctttgcaccactgtactccagcctgagcaaaagaaaccactttttttttttttttttttttttgacagggtcttgcgccatcacccaagctggagtgcagcagtgcgaacaaggctcactgcagccttctcctccctgggctgaatcaatcctcccacttcagcctgttgaatagctgcgaccacaggcaacaccacctcccacagctattttttttttttctgagactgggttttgccttgttgcccaggctggtttcaagtgatcctcttcccttggcttcccaaaagtgctgagtttacaggcgtaagccaccacacccagccttgtaccctcttatattttttaaattttgaacaaaactttacaatttgaatttggaattgtacttacacattttgaattttgaacaaaactacattttgaattttgaactttgaattttgagtttgtaaacaaaattttacaaactctaatgcttttattttgctttttttttttttttaagacagagtttcactcttgtcacccaggctggagtgcagtggcgtgatctcaactcactgcaacctctgcctcccaggttcaagcaattctcctgcgtcagcctcctgagtagctgggattacaggcatgcaccaccacgcccagctaattttttttgcattttcagtagaaacgaggtttcaccatgttggccaggctgttctcaaacttctgacctcaaatgatccggccacctcagcctcccaaagtgctgcgattacaggtgtgagccactgcacccggccctacaaactctaattcttaacttgacagctttttgtatttctgctctcacgaatgactccatgaaaaaaataaaatgaacaattttttttttaaacttgggatatggattaggtcatttgcagggacacaggcaggcctggggaggacaacctgatccaggcaggtatcacaggcccgaaagtcagttgctcaagcagcaaggatgacatagggtagcagagcagacttggtgaggctcagaggatagaatatttgtcgagaagtggaagagtctttttctgtctggaattcacaaggtgctgggagaatctgcctccatttccccagatagacctggatctgggcagagtcagcaagggtgtgtggaggacttggacgatggcaaaggtggtgggctgcagggagtaaattccctccgaggtaggagggggagggaagagtttgtctggaggcaggttgaggctgggagagggctccgaagagctagggataaggagctctgaagaaggaggaggagccagcattgaggagcagtcaagggggatggatgggagttcagaaaaggtggttttgcagatggatgggagtggtgcaggcactttgttttcacatggcttctttccccaagcagtaagccccttccaacattgccaaaacatcctgcagtttttaccagggttcctgcgctgagggcagagctgagtgcagatcaaaggagaaagagaaagaagttggaggttttgttgtaatgtaagacagtttcatcagcctatggatttaaaagtccaggctgacttacctcttcctttcctatagattgctcaggaaatatggttattctagtacgtgctaagcatcgttgtaaaaagtaagcccacagcctaaaatactttgaatgtcttagacaaatgtccaatgtttgctacggttttggattatcaaggccactccttacctctatgagtagccaagggtagtgctctaagctgtgagctagcttctctcagagatgcccacaaacataaacaccccttttcaaagtaagctgctatggactcataggactggaaaatacttcagagagtaatccctccattttattaaagagaatactgaaacctggggagccttgatgacttcaagatggactggaacctggaccttttgtctcctagttattccttgcatccctagtcaaattttatttcctttaaaaaatgtatttacttttatttattattatttttgagacaggtgtctcgctttgttgcccaggctggtctcaaactcccggccttaagtgatcctcccacctcagcttcccaaagtgctgggattacaggcataagccacagtgcccagcccagattttatttctaaagctcactaagaatcctaatttttttttaaaagacagggtctcattctgttgcccaggctggagtacagtggcactatcatggttcactgcagcctcaactgcctgggcttaagcagtcctcccacctcagcctctcatgtaactgggatcccaagcacatacacaccatcatgccctgctaattttcttattatttgtagagatggggtcttgctatgttgcccagactggtctcaaactgctgggctcaagggatcctcctgcctcggcctcccaaagtgctgggattacaggaatgaaccattgagcctgacccaaaaatcctaaaagtatctcctaaatttatctgttcttgacaccacaccaaggcatttggtactgcaagctaaggacaggaaagcccctggttttatactggcagaagttggggaagaagggacaaggatctagatgattgtaaaccccctggatgggatgcatgggaaatggctccacatcatctctccaccagactacatggaaaagagtttgtgcacctctgcttgtttttacgcagagttgtaactgggtgggctggacacttgaaggattcattggctgtcaactccacctgccaccaaggactacctgtcttgagccatgggctgagattaggccccctgtcccatctacattcctagaaaggaaaagtagcaagaaagggacaagaaacaaaattttacaaactctaattcttaacttgacagctttttgtatttctgctctcactggaatgtgaactattcttctgagaagtttggcaatgcggaaaagaagagatgagatagaaaaacagaatttttaaagttcttttgggtcaggcgcagtggctcacgcctgtaatcccaacactgtgggaggctgagcaaggtggatcacccgaggtcaggagttcgagaccagcctggccaacatggtgaaaccccgtctctactaaaaatgcgaaaattagctaggcatggtggcgggcacctgtaatcccagctacttgggaggttgaggcaggagaatcacttgaacctgggaagcggaggttgcagtgagccaagatcgtgctattgcactccagcctgggtgacaagagcaaaactccagctaaataaattaattaattaattaaaataaaataaaattcttttgaaaatttcatagtccgtttcccagattaggaaaaggagaacagagctattgtttactcagcaactactgcatgccaggctcatttaaacctcacattagccctgtgagagatcagggccttcaagataaaaatgctttcagatgagctaaggatgggcgggggagacaaagataaggacactgtgattcagagaattaagtaacttgcccagtgggcctcatttggtacaggaatagggcttttattttatttttttaatgatttgcgaatctggcagccttctgagccagagtaggctcagaaactcctaggaatgtggctttaagcctaggtgcgtctgacacaaaatcaggtgttcttcctcaaatctacaaggcctaaatacaaagagagcagtttagaacagactcttagattcaacagagggaactgggtgcgggcatacaaatcagagaatttaaaagaaaaaggcaaaaagtcaaggtaccacctaaacactgtctacgctgcctccaccctcctgccaaacagcatcccttgagttcaagaattcagtttcagctcaagaacaaactttttatgggtggatgctggctgagccaaagaggaattacttcaacaatcatttgttgcatgaccttttttggtgttttgttttgagaaggagtcttgctctgtcgcccaggctggagtgcaatggcgcaatctaggctcactgcaaccttcacctcccaggttcaagcgattctcctgcctcagcctccccagtagctgggattacaggcacctgccaccacgtccagctaatttttgtatatttagtagagtcagggtttcaccatgttggccaggctggtctcgaactcctgacctcaggtgatccacctgcctcggcctcccacagtgctgggattacaggcgtgagccaccacaccctccctattgcatgatttttatttgcaaaacaaaacccacaacataattcctgcaaccaagaagtttatagtctaatggggaaaccagatattgaacacataataagaaacttcatcagaattgaaatgtaaggaaaacgcactagtctcctgaaggacgtaaaaaagaaatccaattggcaggaaacagtggcatcttcacgcggacttggataggtggggaagtgggtgtaggtacgaggaagtggaagggaaggcaccagccttcaagacgctcctaagtgctgtcgctgaagctgtggagactataacttagtctgagagagacaagagaaagagaaggcccgggcgcagtgttgaagggaagttttgtttagagctggaccttgtcagtctggaggagaggtgaggaataagggggacggagcggtggaagattagagtagaatcatactaacataataaatcacatcattaaaattagtcctagggttaattatatactaaaggtgaaatgggcaaggtcatcgatagcacaagcggagggcgactgccttggcaagaagttgggatcaatcctgagaatggaggggagggcgggtgtgattttaaaggactgacatggagtggaggaaagttgagggcactggatcgtctggctttgtggaaagtgaaatcatatttcaggcctgaagggctgaggcggttactagctttacaagagttggaaaagcctgggaatgtgtctggagcaactgtgagcacactcagcagaggaggcaggcgtgggtaatagctaccaacagctctgttagccacggggcggatggggccctgagaggtgccacggatgcacccagggcagcgctcggcacagctggaccggagacgcaccacccctgggagcaggtggcagcgcccgcagccgagagaacgggtgcgcgcgcgcgctgcgggatgcggcgcgggcggggcgcggggacgcggagcgagtagcgccatgggcagccgggattggggggcgggcccgagtgagcgggcctccgcgcggcacttggcacgcacgcgcaaactggccgcggggcttggaggtacagaggagggggagcgagaaagaggggggtgtggaacgtatttccgctctggcggacaaataatcccggccaaagaggaggcaaggccgtccggccctttaaccgcgtgggggtgctggtgaagaaaggggggtcgggaaggggggatcctgctcctttaattccctcccctcttcctcctccccgagtcctagccgacgccgccgccgccgcgcgcgcggggcctggaacacacggcacgagccgcccccgcccctccccccttacgcccacgcggagccggccccgcgcgcgcgcgcgtcccgtgcatccccgcgcctgcgcgctgcccaggccctgcccgtgtgtgggggtcgctgccggccccgggggggggtggggaaaataagggattaaaaaaacagcgcgcggaaccgggccaggtgagaggagcgtgcactcagggtcgtggggctgggggggcgtgccacggagctctgagcgtgggggcagggcgtgcacggtgcgtgctggcggcgggggggaggacgtgaaaagcgcgtgcaaacgtgtaaggggggggcggaggaatgaggcagccggtaaagggggcggggtgagaagagcctgcaaccggggccaccttggagtccagagccccaggcctctggcccccctttttctccgtccttccaccgtgggcgcgcgggctcgccccatcctagcgggctgctgggctggggggtgtggacgccgctgccccgcccccgagaaccacgcctccctcctctcagagggacagcacctccccagggttggggaaactgaggaagaaatctgaagaccgggagatcggatgccggggggctgggcaagaatgggggcgagggtcctggagccttggcttcggagagccagagacctttgtctctgaccggtttccttcccaaccagggttgcccacccccgccacaatggcctctggggtggaagtcctgcgcttccagctgcccggccacgaggccgcaacgctacggaacatgaaccagctccgggcagaggagcggttctgcgacgtgaccattgtggccgacagcctcaagtttcgaggccacaaggtcatcttggccgcctgctcacccttcctgcgggaccagttcctgctgaaccccagctcggagctgcaggtctccctgatgcacagtgcacgcatcgtggccgacttgctcctctcctgctacacgggcgccttggaattcgctgttagggacatcgtcaactaccttacagccgcctcctacctgcagatggagcacgtggtggagaaatgccggaatgccctcagccagttcattgagcccaaaataggcctcaaagaggatggggtcagtgaggctagccttgtgagcagcatcagcgccaccaagtccctcctccctccagccaggaccccaaagccagccccgaagcccccacccccacctcctctaccccctccactcctgcggccagtgaagctggagttcccactggatgaagacttggagctgaaagccgaggaagaggatgaggatgaggatgaggacgtgtctgacatctgcatcgtcaaggtggagtcggccctggaggtggcacaccggctcaaaccccctggaggcctgggagggggtctgggcattggaggctccgtgggtggccaccttggggagctggcccagagcagcgttccccccagcactgtagccccaccgcagggtgtggtgaaggcctgctatagcctgtcggaagatgcagaaggggagggcctgctgttgattcccggaggccgggccagcgtgggggccacctcgggcctggtggaagcagcagcggtggccatggctgcccggggggcggggggcagcctgggggcggggggcagccggggacccctgcctgggggcttctcaggtggaaaccccttaaagaacatcaagtgcaccaagtgcccggaagtgttccagggcgtggagaagctggtcttccacatgcgggcgcagcacttcatcttcatgtgccctcgctgtggcaagcagttcaaccacagcagcaacctcaaccgccacatgaacgtgcatcgtggtgtcaagtcacactcgtgcggcatctgcggcaagtgcttcacacagaagtccacccttcacgaccacctcaacctgcactcgggagcgcggccctaccgctgctcctactgcgacgtgcgcttcgcccacaagcctgccattaggcggcacctcaaggagcaacacggcaagaccacggccgagaacgtgctggaggccagtgtggccgagattaacgtcctcatccgctagccgcgcaggcgtggaggccaggaggctggggcccctgggctgcgtggaaaaagggctctttggcccaggagaattggggggtggggggtctggggcagaaaggtaagagtgggaggctgagcagatgcacacatcctgagagagggaagatgattccttggagagacttgctcttgagagtgcaagaatctggagctgggaaaagggttcttggaggccaggggaatacggggtcccagagaaagatttccttctcttagaagtgcatgtatatgtggagggagggaaaagggtcctatagaatgagggaagacaaaaatgttttattcctggctaaggctgcccaggggaaggttctgacatttctcgagataagaagggttggggggtgggtgggaacagggagggaatttggcaggaggacatgctcctgcttagaatagacctggggtgagggagtggtaaggggaaaagattactgagtcccagaaaaggaagtgggagacagttcttgcatgctggggaaatgagactgcgagtatgaggcttgctgaaatttgagggagaacaaagtaagacgccaggtaagagaacgtggggtgcgcatcctgggtagatattgggaagtgggggtacaatagcaagaaacaatggatagtcatgggggtgggggggatagggcacttagaaaagaaagaacacaagaagggctgttgggagggagggagaggagtagagacatacagtattttttaagaaaaaacatattttttaggattttttctggagtttggggttttagtttttctgcttttgttttccacaaaataaaaaacaaaaaaaaacttttttttttcctttacactctggcaactgcgtgtacatgactatcctgccctagacagcctctccctgtgatgctgcgttcttaatacctagaggtcacaactctgcatatcccttgcctgaaggagcccagccctaaacatgggagaggagtgtgacaagtgagctcctctggtcagggactcccccaagtccccacccccagccctccaccagttctgcaatctcaacacttagccaggtacctcacagtacaagtgattggcagtcgtggggatgcacatgaactctatttgagggacttaggatcagtgctagggatgagctacaggtggccaacctgcccacggaaattgtaagcaggagtctgtttggtcatattttgtctggggtaaataggtcatgtcttcaggaaagctaaaaaaaaaaaaaaaaagctaagtttggattaaggtgcagggaaaactacaattcccagaaagctctggaatagttaaccaaagagaactacagttcccagaaggcctttaattggcctcaggtgccccacctgcctgtgtcaaatactgcgtgtgaaatcatacagatcttttccaaactcgaccaaaacgtaatacctaaagggatggtaccctaaatacagctatcgagattgtctatcttggtgtatatcatttatacttaaattgtccgctgggctatgacccacggagtacctgactgtgcttatgaagtgttcggcaaaaaaggtttacttactgcagtgtcaccagtcagtaatgacgttcgggccgctgggcttacctggatccctagtgcgtgtgaaggtgtaacacgcctgatataaacagaagagacatttagccacaggttttcagaagggcacgctgctccaggggacatgaagcagcatgctagaaccagccaagaataaaggtgtcctccgcgtccctatcgccccttcgtgctcgttagaaagagcaaaaaggcgaggccaaaactgaggccaagccttctatctggtaacccaaaaactagaaaggcagaaaagcaaccagaggcgggaaaagcccaaccaggccagaggaaatacagccgctgccgagagccgagaagttcagaagctccgcttgttacctaaaaccagatggggacagagacgccacacctgggcccaggcgtgtctcgccctcggtccctgcagaactgaggccaggaatgacaggaattctcccttgcagctcccagcttaggacagtcacagccatctccgaggccgctctcaggggaaaatggccaaaaagcatgtagcggctcctttaaggctcctcctcgccctccctccctcgcccacgtgacccggggcggccgcgcgccggctcggcccccagcgcaagcggcgatggcggcggcggcgggagctgcagcggcggcggccgccgaggtgcggaaggggagggggagaggcgggtgcatgcccgcgcgcgcgcccgggggaagcgcgcgcccgtgcaatgctccgggggtgcaacggggccggggggcccgggcgggacttgcagcaatccagggggccagcaccgggggcggatgaggggaccagggtgtgggaggtggggggagtgggcacggaggcgcgcgtgcagccgccggctgcccctgagtgggcgacgggcgccggggccccaggagcacgcgtgaggggcacgaggggccgtccaccgggctggggggcagcgggtgctggaggggttggtgcccggggtccccgcggcctgggggacaaagggggagcggcgcgtgcagccgggaggagggggcggggccggggcgcggaggccccgccccctccccctcctcttctctcggccccagagatgcggggtctaccgagagggagggggttgatgcgggcccgggggaggggtcgtgcggcccctccgggcagccgaggccgcggaaggggggggccccacagaggaagaggtaggccccggagcctactctctcttcccagggcccaggcatcctggaccccccaactctctactgggctgaccagccctcctgtcccttgtctcccctcccagggggaggcccccgctgagatgggggcgctgctgctggagaaggaaaccagaggagccaccgagagaggtgagtgcagctaaaacgggccccaattggaccgtcaccttccctaaacacaggatctcctgagcccttagctctgaactttttctcttcctctacagttcatggctctttgggggacacccctcgtagtgaagaaaccctgcccaaggccacccccgactccctggagcctgctggcccctcatctccagcctctgtcactgtcactgttggtgatgagggggctgacacccctgtaggggctacaccactcattggggatgaatctgagaatcttgagggagatggggacctccgtgggggccggatcctgctgggtgagaggctgggtagcctggggggttggtgggaaatttctgactcttgccttctttcttatcttgccttttgcttgcttgttttctaggccatgccacaaagtcattcccctcttcccccagcaaggggggttcctgtcctagccgggccaagatgtcaatgacaggggcgggaaaatcacctccatctgtccagagtttggctatgaggctactgagtatgccaggagcccagggagctgcagcagcagggtctgaaccccctccagccaccacgagcccagagggacagcccaaggtccaccgagcccgcaaaaccatgtccaaaccaggaaatggacaggtgagtgggatgggagagatgggataatcaaccataaacctttggtgagctcttttacagtttcacttaaggcttctactccatttactcattcacatatttaagcaaggggctgctgtgtgtcaaatattaggctgtgcttgatctgtgaaccaacagacaggttcctctcttcctgcagtttacattcttgggtggtgaaagtttgatgttaaagagtcaattatatagttaatgtcttaattactcttatgataatgacaaggtaagggaatttcaaaccactcttcctttctacctcaaagcaagcccttggggaactcatctgtcactgctctatttgtaaagtttttcctgggaatcccagtgggaaaggagatgagggccacagaaataatagaggagggaagtgacaagggcaccagaagctttatgaccaagttctagggttcttgggtcatacctattgttgacctaaaggaaaaaactgaggcaaacttaacattaagtaaagtatatttggtcaggttttgaggacagcctttaggagcaaagattcaagttgccgtgaaaatacactctgattagcagcagttataagtaggggtttttttgtttgttttgttttgtttttgaagacagtttcactatgttgcccaggctggtctcaaactgctgggcttcagcaatcttcctgccttgacctcgcaaagtgctgggattacaggtgcaagccaccacaaccagcccacaagtaggtttttaaaggaaaagaagattggatgacgtgaagatattgaaaaaaaacaggctgactctgggcacactgcgtaggagttagccctgctctggaaggagccgcaaaaagaaaaaaaaaaagataaaaattttttaaaagattgaagaaataacaaaggaaaagaagaggcagttcctaaattgtttaccagtttacattagaataacaagctattgatctgctatacattgttctttgtctcacagatattaggcacatgaagataatgggtgaagcagcaccctagtcaggtacaaaatgcctttaagcagttgcctccaggcatgggccctaaccgttccatgctgacttctcgctgagcctgatcaattttgcctgcttcacatagcacaggttgctatgagctacctttcctttctcactatgataaacattaatttttatagttgcaattcattttgtaaagaatagggaagaaaaggaaaattgaatttataaattaggtacagtgagagattaacaacaataataacataatagcgtaatcctaacagtaggccaggcgtggcttgcctataatctcaacactttcagaggccaaggccggcaatcacttgaggtcaggagttcgagaccagcctggtaaacatgtccaaaccccgtctctaactaaaataataataataataataaattagccaggtgtggtggcgtgcgcctgtaatcccagctagtcgagaggctgaggcaggagaatcacttgcagtgagccaagatcgcgccactgcggttcagcctgggcaacagagcgagactcaaaaaaaatagcacaattctaacaatatgccaccatcactgctgatgaactggataagaggggactagtgtcacgtaaaatttaccatctaaaaaacaattttaggccaggcgcagtggctcacgcctgtaatctcagcactttggaggccgaggcgggaggatcacctgaggtcaggagtttgagaccagcctggccaacatagtgaaaccctgtctctactaaaaatacaaaaattaggccaggcggggtgcctcacgcatgtaatcccagcactttgggaggccaaggcaggtggatcacctgaggtcaggagttcgagaccagccggacgaacatggtgaaaccccatctctattaaaaatacaaaattagccgggcatggtggtacatgcctgtaacagtccgctacttgggaggctgaggcaggagaatcgcttgaatccaggaggcagaggttgtagttagccgagatcctgccattgcactccagcctggacaacaagagcaaaactctgtctcaaaaaaaaaaacaaaacaaaaattagccgggcgtggtggcatgtgcctgtagttccagctactcaggaggcagaggtgagagaaacgcttgaacctgggaggtagaggctgcagtgaactgagattgcgccactgcactccagcttgggcaacagagtgagactccatctaaaaatttaaaaataaaataaaaaacatttttaagtatataatttaatggtattaaatactttcatcatgtgcaatcatcagtcaccataactcatcttgtaaaactgaaactctgtacccattaaaacataactctccattccctccaccccctagcccctggcaaggaccactgtcctttctttctctataaatttgagtaagtactttatctaagtgtaatcatacagtatttatccttttgtgactggcttatttcacttagcataatgtcctcaaggttcatctatgttgtaccatgtcagaatttctttcctttcacctgggcagcataccaagaccccatctctaaaagaagtttaaaagaatgtttcaaaggccaggcccagtgactcacgcctgtaatcccgtactttctggggaggatcacttgacaccaggagttcaagaccagcctgggcaacatggcaagacctcttctctaccaaaaaaaaaaattaagaagacattagttaggcattgtgacatgtgcctgtaatcccagcttcccaggaagctgaggcaggagaatggcttgagtccagttcgaggctgaagtgagccatagtcatgccactgcactccatcctgggtaacagaatgagaccttatctcttaaaaaaagtatatctttcctttttatggctgaatgttattccattgtgtataaatgccacattttgcttatccattcatctgtcagtggcacttgagttgcttccgcacctcagctgttgtaaacagtcctgctgtgtatatggccacatataaaaggtcttttaactttattaagctttgttttctcatctgtaaaatggaaaagggcctgctctgcatggttgcagagatgagtgagtgttagtgtgcttgacactcttcctctgaggaaatagcacccgtggttgccagtttgtggctactggagcctcacatggcatttggaggtgtggctcactaccccacccccgcctggggctccaggctaacccaggcaaaactgtaggtgctctctgaccctcagtgtgctccctctcggcccacagcccccggtccctgagaagcggccccctgaaatacagcatttccgcatgagtgatgatgtccactcactgggaaaggtgacctcaggtcagtcccatcccccacccccggtggcttgatgtggtctgttctgaaggtttcggtgataggccccacaccattctctctcttcttccagatctggccaaaaggaggaagctgaactcaggaggtggcctggtaagcagcagaggcagagcctctacccctcgggggctgctctgagggagggtcagaggtggggctgcatcccatcctcagtagaaatgcgcagggtgtcagtggcctcaatttttctgatctttttctagtcggaggagttaggttctgcccggcgttcaggagaagtgaccctgacgaaaggggaccccgggtccctggaggagtgggagacggtggtgggtgatgacttcagtctctactatgattcctactctgtggatgagcgcgtggactccgacagcaaggtgagacagagctggtctgccctccccaccggtgctcccccagggctggggctcactgtccagtcctccttgttccctgtttttctgctttctgtcctttttatcttctgaatatccactaagtcattgccccatgctgtctataactccttttttttgtggggggagacggaatctcattctgtcgcccaggctggagcgcaatatcacgatctgggctcactgcaacctctgtccccagggttaaagcaattctcctgcctcagcctcccgagtagctgggattacaggcacctgccaccacgcccggctaatttttgtatttttagtagagacggggtttccctgtgttggccaggctggtctctaactcctgaccttagttgatccacccaccttggcctcccaaagtgctgggattacagctgtgagccaccgcgcccagctgtaactcattttcaatgtgtattctgcccgtttcatccacaaaggtggccaccaccctgcacatgggatttagtattcttttttttttaatcagctaatgaaatgaccatttaacagacatgtactgtttaaaaaaagaaaacaaaaaaagaaatgaccagaaagcacttttttaaaacatacgttatgctgtttatataaaattcaaaagcattgcattgtcatttatttgcttatttcgttgctctttgtctggttttatcttatatgtttgcctacacagtagaatgtttagtctctctgattttgccttttatttaacattttatcatgaaaacttgcaagcataatcaaaagagtagaatagggagcccccatgtacccaatacacagctccagccattatcagtacacagtccatcttgacccatctgtacatctcccagcacacacacctactaggttattttaaagcaaatcccagacctcatatcattttacctaaacatatatccatatagatttgtaaatataaggcctctttttgtcgttcaacatcattacactactgttttcacacctaaaaaaacttaccgatttcttaataccatcaaatatcctgtcagtcttcacatttcctcagctctcacaaatggtttttgtcaagatccaaatgaggcccacaccttgatttgattaacatttgtcttaggtcagccaggcacagtggctcacgcctgtaatcccaatactttgggaggccaaggcgggcagatcacgtgaggttgggagttcgagaccagcctgatcaacatggagaaaccccgtctctactgaaaaaaatacaaaattagctggacgtagtggtacgtgcctgtaattccagctactcgggaggctgaggcaggagaatcgcttgaacctgggaggtggaggttgcagtgagccaagatcgtaccattgcactccagcctcggcaacaagagcgaaactccgtctcaaaaaaaaaaaaatttttttttgtcttaggtctctctcagtatttaggtttccccatcttctttgtgtttgtttgtttgtttgtttttgttttttgagatggagtctcacactgtcacccaggctggagtgcagtggcgtgatcttggctcactgcaagctccacctcctgagttcaagcaattctcctgcctcagtctcccaagtagctgggattacaggcacccaccaccatgcccagctaattttttgtatttttagtagaggcagggtttcactatgttggccaggctggtctcaaactcctgatctcgtgatctgcccacctcggcctcccaaagcgctgggattacaggcgtgagccaccacacctggcctgatttcctcatcttctaaaaaaaaattttttggcccaggcgtggtggctcacgcctgtaatcccagcactttgggaggcaggtggatcacctgaggtcaggagtttgagaccagcctagccaacatggtgaaaacacatctctaataaaaatacgaaaattagctgggtgtggtggcgggtgcctataatcccagctactcaggaggctgaggcaagagaattgcttgaatccaggaggtggaggttgcagtgagctgagatcacaccattgcaatgcagcctgggcaacaagagcaaaactcaataaataaataagaaagattttttttttttgccatttatttgtcaaagaaaccagctcagttgtcctacagaatttttcacatttaggagttggctgattgggtggagattgacacatcctctctgcccatatttcttgtaaactgatagatctagaggcggaatcagcttcaggtgccaagaagacttgacagtgggtgcaagtgcttctggccacatcacatcaggatgcatggaacatctaatctggtcatttttcttgttagtgataagattgaccagtgggttcaggtgatgtcagcctgaacctttcatataaagtttctcatgagctttgtgtctagtgtttttagcaaccattggtggtcttgcctgtttatgaacatcataaaaggggtatcaaagtatgtttatcttctggtacttgctttttgttttttaacttaatatcacattaccaagatctgtgcacattgctgtctgtaactttttcactgctgtgtaatattccatgcaccctctctttatgtggccctttgtctcctctgctacccacacttatccccagcagccatccgtgggtagtggcggggggcaatggtggtggtggttttctttactcacctcattgtctgagtcctgggggttggatatgtctgttctgcctctctcccagtctgaagttgaagctctaactgaacaactaagtgaagaggaggaggaggaagaggaggaagaagaagaagaggaagaggaggaggaagaggaagaagaagaggaagatgaggagtcagggaatcagtcagatagggtaagagacggaggctgatatctccagaggagtgggagactatggggctggaggtctggtcctgaaggtgttgggggggcccctgggggtgagggttcctaactcctcctcctcccccttcccagagtggttccagtggccggcgcaaggccaagaagaaatggcgaaaagacagcccatgggtgaagccgtctcggaaacggcgcaagcgggagcctccgcgggccaaggagccacgaggtgaggaggctctgctgcttttgggtgccctccagcccccgcccggccccccagagtgtgtgcacgcacacacacgctctcgcatgtccacctgcatgtacccacgcgtccaggcacctgtgagctcgcactctcactctctctgtctctgtgtcaggagtgaatggtgtgggctcctcaggccccagtgagtacatggaggtccctctggggtccctggagctgcccagcgaggggaccctctcccccaaccacgctggtaattgccaattgccgggacagggagccactagggggcgacctcagggcaggagggaaagggaaggaggggaaccacgccagagccggggtgtccatggccaggctttaggggttctggggcatggcggggtggggtagggagggagtgagaggacccgccaggggtcccagtaggtgaggtgcagagcctccctcagctcctcttttcctccatccaaggggtgtccaatgacacatcttcgctggagacagagcgagggtttgaggagttgcccctgtgcagctgccgcatggaggcacccaagattgaccgcatcagcgagagggcggggcacaagtgcatggccactgagagtgtggacggagaggtggggccgtgggctggtgggagaggtgccagggcgtccagtccccggccccagcctcacgctctcttctcacccatcctcactgcgcacagctgtcaggctgcaatgccgccatcctcaagcgggagaccatgaggccatccagccgtgtggccctgatggtgctctgtgagacccaccgcgcccgcatggtcaaacaccactgctgcccgggctgcggctacttctgcacggcggtgagtgaccagtggggcagacaggtagcatgccctgtggcagagggggccccagtaacctgaccatgttgtttccctgctcccagggcaccttcctggagtgccaccctgacttccgtgtggcccaccgcttccacaaggcctgtgtgtctcagctgaatgggatggtcttctgtccccactgtggggaggatgcttctgaagctcaagaggtgaccatcccccggggtgacggggtgaccccaccggccggcactgcagctcctgcacccccacccctgtcccaggatgtccccgggagagcagacacttctcagcccaggtactggcctcccccttctgtactgtctgttccctcccccacccctattgctcctggacatgagctccttcttccacagtgcccggatgcgagggcatggggaaccccggcgcccgccctgcgatcccctggctgacaccattgacagctcagggccctccctgaccctgcccaatgggggctgcctttcagccgtggggctgccactggggccaggccgggaggccctggaaaaggccctggtcatccaggagtcagagaggtgagtggggagttgctcaggcacagcaactggggctgaggccagaggagtggtgtcgaggctgatgctggaatctgaggagctccccttctctccccgctcccgtgctcccttggcaggcggaagaagctccgtttccaccctcggcagttgtacctgtccgtgaagcagggcgagctgcagaaggtgatcctgatgctgtgtgagtgccacccattccttcagcagaccttgaccaagcttcatgtatataccaggcactgggtacagggccaggagtacagtcgtgaaggacacagtccttgccctgaaggacttagtgtggtggggaaaagacacatgtaacccataacgatggggatgtggtgactcataggtgctgggtcctgttctgagtgcttatacctgttagccttggcttgcacagagaggttagggaccttgcacagtgcacagtggtactgagaagcaaggcagggtttgaattcaggcagagctgatgcctttgactccttattctgataaatgctgtggtggaggcaagctcggagaatgccaggaggggccctgatccagcttggggccctgagaagccttcctgaaagaagtgccacctgccccctagcttgcttaccacttgtccctccctctcccggtgtggcgggctctccccgcagtggacaacctggaccccaacttccagagcgaccagcagagcaagcgcacgcccctgcatgcagccgcccagaagggctccgtggagatctgccatgtgctgctgcaggtcagcacgggcccggccccatgcctcattcaccaggcccttaggcccctcccctgccccatgcctccctggtgccagccctcctgccccctcacaggctggagccaacataaatgcagtggacaaacagcagcggacgccactgatggaggccgtggtgaacaaccacctggaggtagcccgttacatggtgcagcgtggtggctgtgtctatagcaaggtgtgcgcgcaggcagcagggcgtggcccccggagtcagggaccaggtttggggtgccagcccaaaggctcatttgcccgtgtctccctcaggaggaggacggttccacctgcctccaccacgcagccaaaatcgggaacttggagatggtcagcctgctgctgagcacaggacaggtggacgtcaatgcccaggtcagcggcccacccagcccagcccctctgggtccctggtgcctgggttccttggcttggcctcaggctttgggccgcctttcctacatctgacctcacactgctcgtgtctgtcctcattgctttcttcttcctcatttgtatttctcttcattcttttctttctcgtttctttctctttatcaagtttcagaataatcagttcctgtcttaatctctgaaagtgtccagtgaggctttttattaactcttgggttgtcatacattggatgtgttttagtcatttattggc

SEQ ID NO: 311 - DNA, 2250 bp, Homo sapiens
ctcttgggttttttgtggcttccttcgttattggagccaggcctacaccccagcaaccatgtccaagggacctgcagttggtattgatcttggcaccacctactcttgtgtgggtgttttccagcacggaaaagtcgagataattgccaatgatcagggaaaccgaaccactccaagctatgtcgcctttacggacactgaacggttgatcggtgatgccgcaaagaatcaagttgcaatgaaccccaccaacacagtttttgatgccaaacgtctgattggacgcagatttgatgatgctgttgtccagtctgatatgaaacattggccctttatggtggtgaatgatgctggcaggcccaaggtccaagtagaatacaagggagagaccaaaagcttctatccagaggaggtgtcttctatggttctgacaaagatgaaggaaattgcagaagcctaccttgggaagactgttaccaatgctgtggtcacagtgccagcttactttaatgactctcagcgtcaggctaccaaagatgctggaactattgctggtctcaatgtacttagaattattaatgagccaactgctgctgctattgcttacggcttagacaaaaaggttggagcagaaagaaacgtgctcatctttgacctgggaggtggcacttttgatgtgtcaatcctcactattgaggatggaatctttgaggtcaagtctacagctggagacacccacttgggtggagaagattttgacaaccgaatggtcaaccattttattgctgagtttaagcgcaagcataagaaggacatcagtgagaacaagagagctgtaagacgcctccgtactgcttgtgaacgtgctaagcgtaccctctcttccagcacccaggccagtattgagatcgattctctctatgaaggaatcgacttctatacctccattacccgtgcccgatttgaagaactgaatgctgacctgttccgtggcaccctggacccagtagagaaagcccttcgagatgccaaactagacaagtcacagattcatgatattgtcctggttggtggttctactcgtatccccaagattcagaagcttctccaagacttcttcaatggaaaagaactgaataagagcatcaaccctgatgaagctgttgcttatggtgcagctgtccaggcagccatcttgtctggagacaagtctgagaatgttcaagatttgctgctcttggatgtcactcctctttcccttggtattgaaactgctggtggagtcatgactgtcctcatcaagcgtaataccaccattcctaccaagcagacacagaccttcactacctattctgacaaccagcctggtgtgcttattcaggtttatgaaggcgagcgtgccatgacaaaggataacaacctgcttggcaagtttgaactcacaggcatacctcctgcaccccgaggtgttcctcagattgaagtcacttttgacattgatgccaatggtatactcaatgtctctgctgtggacaagagtacgggaaaagagaacaagattactatcactaatgacaagggccgtttgagcaaggaagacattgaacgtatggtccaggaagctgagaagtacaaagctgaagatgagaagcagagggacaaggtgtcatccaagaattcacttgagtcctatgccttcaacatgaaagcaactgttgaagatgagaaacttcaaggcaagattaacgatgaggacaaacagaagattctggacaagtgtaatgaaattatcaactggcttgataagaatcagactgctgagaaggaagaatttgaacatcaacagaaagagctggagaaagtttgcaaccccatcatcaccaagctgtaccagagtgcaggaggcatgccaggaggaatgcctgggggatttcctggtggtggagctcctccctctggtggtgcttcctcagggcccaccattgaagaggttgattaagccaaccaagtgtagatgtagcattgttccacacatttaaaacatttgaaggacctaaattcgtagcaaattctgtggcagttttaaaaagttaagctgctatagtaagttactgggcattctcaatacttgaatatggaacatatgcacaggggaaggaaataacattgcactttataaacactgtattgtaagtggaaaatgcaatgtcttaaataaaactatttaaaattggcaaaaaaaaaaaaaaa

SEQ ID NO: 312 - DNA, 618 bp, Homo sapiens
atgaccgagcgccgcgtccccttctcgctcctgcgtggccccagctgggaccccttccgcgactggtacccgcatagccgcctcttcgaccaggccttcgggctgccccggctgccggaggagtggtcgcagtggttaggcggcagcagctggccaggctacgtgcgccccctgccccccgccgccatcgagagccccgcagtggccgcgcccgcctacagccgcgcgctcagccggcaactcagcagcggggtctcggagatccggcacactgcggaccgctggcgcgtgtccctggatgtcaaccacttcgccccggacgagctgacggtcaagaccaaggatggcgtggtggagatcaccggcaagcacgaggagcggcaggacgagcatggctacatctcccggtgcttcacgcggaaatacacgctgccccccggtgtggaccccacccaagtttcctcctccctgtcccctgagggcacactgaccgtggaggcccccatgcccaagctagccacgcagtccaacgagatcaccatcccagtcaccttcgagtcgcgggcccagcttgggggcccagaagctgcaaaatccgatgagactgccgccaagtag

SEQ ID NO: 313 - DNA, 3012 bp, Homo sapiens
gtcctctagcccagctcctcggctcgcgctctcctcgcctcctgtgctttccccgccgcggcgatgccagggccttcgccagggctgcgccgggcgctactcggcctctgggctgctctgggcctggggctcttcggcctctcagcggtctcgcaggagcccttctgggcggacctgcagcctcgcgtggcgttcgtggagcgcgggggctcgctgtggctgaattgcagcaccaactgccctcggccggagcgcggtggcctggagacctcgctgcgccgaaacgggacccagaggggtttgcgttggttggcgcggcagctggtggacattcgcgagccggagactcagcccgtctgcttcttccgctgcgcgcggcgcacactacaggcgcgtgggctcattcgcactttccagcgaccagatcgcgtagagctgatgccgctgcctccctggcagccggtgggcgagaacttcaccctgagctgtagggtccccggcgccgggccccgtgcgagcctcacgctgaccctgctgcggggcgcccaggagctgatccgccgcagcttcgccggtgaaccaccccgagcgcggggcgcggtgctcacagccacggtactggctcggagggaggaccatggagccaatttctcgtgtcgcgccgagctggacctgcggccgcacggactgggactgtttgaaaacagctcggcccccagagagctccgaaccttctccctgtctccggatgccccgcgcctcgctgctccccggctcttggaagttggctcggaaaggcccgtgagctgcactctggacggactgtttccagcctcagaggccagggtctacctcgcactgggggaccagaatctgagtcctgatgtcaccctcgaaggggacgcattcgtggccactgccacagccacagctagcgcagagcaggagggtgccaggcagctgatctgcaacgtcaccctggggggcgaaaaccgggagacccgggagaacgtgaccatctacagcttcccggcaccactcctgaccctgagcgaacccagcgtctccgaggggcagatggtgacagtaacctgcgcagctgggacccaagctctggtcacactggagggagttccagccgcggtcccggggcagcccgcccagcttcagctaaatgccaccgagaacgacgacagacgcagcttcttctgcgacgccaccctcgatgtggacggggagaccctgatcaagaacaggagcgcagagcttcgtgtcctatacgctccccggctagacgattcggactgccccaggagttggacgtggcccgagggcccagagcagacgctgcgctgcgaggcccgcgggaacccagaaccctcagtgcactgtgcgcgctccgacggcggggccgtgctggctctgggcctgctgggtccagtcactcgggcgctctcaggcacttaccgctgcaaggcggccaatgatcaaggcgaggcggtcaaggacgtaacgctaacggtggagtacgcaccagcgctggacagcgtgggctgcccagaacgcattacttggctggagggaacagaagcctcgctgagctgtgtggcgcacggggtaccgccgcctgatgtgatctgcgtgcgctctggagaactcggggccgtcatcgaagggctgttgcgtgtggcccgggagcatgcgggcacttaccgctgcgaagccaccaaccctcggggctctgcggccaaaaatgtggccgtcacggtggaatatggccccaggtttgaggagccgagctgccccagcaattggacatgggtggaaggatctgggcgcctgttttcctgtgaggtcgatgggaagccacagccaagcgtgaagtgcgtgggctccgggggcgccactgagggggtgctgctgccgctggcacccccagaccctagtcccagagctcccagaatccctagagtcctggcacccggtatctacgtctgcaacgccaccaaccgccacggctccgtggccaaaacagtcgtcgtgagcgcggagtcgccaccggagatggatgaatctacctgcccaagtcaccagacgtggctggaaggggctgaggcttccgcgctggcctgcgccgcccggggtcgcccttccccaggagtgcgctgctctcgggaaggcatcccatggcctgagcagcagcgcgtgtcccgagaggacgcgggcacttaccactgtgtggccaccaatgcgcatggcacggactcccggaccgtcactgtgggcgtggaataccggccagtggtggccgaacttgctgcctcgccccctggaggcgtgcgcccaggaggaaacttcacgttgacctgccgcgcggaggcctggcctccagcccagatcagctggcgcgcgcccccgggggccctcaacatcggcctgtcgagcaacaacagcacactgagcgtggcaggcgccatgggaagccacggcggcgagtacgagtgcgcagccaccaacgcgcacgggcgccacgcgcggcgcatcacggtgcgcgtggccggtccgtggctatgggtcgccgtgggcggcgcggcggggggcgcggcgctgctggccgcgggggccggcctggccttctacgtgcagtccaccgcctgcaagaagggcgagtacaacgtgcaggaggccgagagctcaggcgaggccgtgtgtctcaacggagcgggcggcggcgctggcggggcggcaggcgcggagggcggacccgaggcggcggggggcgcggccgagtcgccggcggagggcgaggtcttcgccatacagctgacatcggcgtgagcccgctcccctctccccgcgggccgggggacgccccccagactcacacgggggcttatttattgctttatttatttacttattcatttatttatgtattcaactccaagggcgtcacccccattttctacccatcccctcaataaagtttttataaaggaaaaaaaaaaaaaa

SEQ ID NO: 314 - DNA, 700 bp, Homo sapiens
gcccaaggttcagggtcactcaatctcaacagcccagaagcatctgcaacctccccaatggccttgccctttgttttactgatggccctggtggtgctcaactgcaagtcaatctgttctctgggctgtgatctgcctcagacccacagcctgagtaacaggaggactttgatgataatggcacaaatgggaagaatctctcctttctcctgcctgaaggacagacatgactttggatttcctcaggaggagtttgatggcaaccagttccagaaggctcaagccatctctgtcctccatgagatgatccagcagaccttcaatctcttcagcacaaaggactcatctgctacttgggatgagacacttctagacaaattctacactgaactttaccagcagctgaatgacctggaagcctgtatgatgcaggaggttggagtggaagacactcctctgatgaatgtggactctatcctgactgtgagaaaatactttcaaagaatcaccctctatctgacagagaagaaatacagcccttgtgcatgggaggttgtcagagcagaaatcatgagatccttctctttatcagcaaacttgcaagaaagattaaggaggaaggaatgaaaactggttcaacatcgaaatgattctcattgactagtacaccatttcacacttcttgagttctgccgtttca

SEQ ID NO: 315 - DNA, 31737 bp, Homo sapiens
gaattctttgtggttgcctccactacaaaacaaggtaataaaaatcatctataaatctgtagctaaccatttcaaaacacaaatggactgtaatgagtaagctcaagtgagacaaaaaaatgatcaaccagattgcttcatcatatctcaacctggtacttgcagagggttctattgagcagagcttagtgttgaggctgtgggtgcagctgtggcttcctcaccccctccaggcaggggtggagcaccatggtgaggggaggggggccagagtttaccgtagaaaccagaagtgctagttaagaagccagaggaattctgagcctcccctctcaccgccttcccctgcaaccagaattgcattcctgcatatttagcaccagaattcctaagcaatttacaagcattagcaccgaagttgagaatctgggggagtagggaggggccaataaatagcacctcttccctgcctgccagggttcctaaccaactgagaaattccacaaacgtgccagcagatgaggaagcagccttggtggacagggcttgttagaagagccaaatgggcttgctaattcctcacaagccccctagtctagacttagagcggtccactggaggaaggttttgggtctgtagaacaggttcacatccccaatattgctgcctgccaccaaactgggcaggaaggaaaggaaaaagaggccagatctcccacagtgagaacttttgacaaattaaccacttgatccttcctcaaggagactgggggagagaagagttaccgccctaacatgcacacctaatgtttcccaaacttttgtaccctgatatggtttggctgtgtccccacccagatctcatcttgaactgtagctcccataatccccacgggtcgggtcatgggagggacccagggggaggtaatggaatcatgggggcgggtctttcccatgctgttctcacggtagtgaataagtctcacgagatctgatggttttacagagggcagttcccctgcacatgctgtcttgcctgccgccatgtaagatgtgcctttgctcatccttcgccttccaccatgattgtgaggcctccccagccacatggaactgtgagtccattgaacctctctttctttataaactacccagtgttgggtatttcttcatagtgaaacagccaagtagaaaggggccctagagaagctccaaccggctagggcactgggagaacagggtagcgccatggaagtttgtgccatttcctggcgggaggagcctggcccctcctgttcctgtgcagtaacctgggattcaacctgtgagatgggggcctgttaacaggaacccctctggctttgctgagagtctttttcctttttgcccaatatattccataacccctcacccttcaaaatgtctgtgtgccaaatctttcctggtcatgtgacaagaacccagtttttagctgaactgaggagaaagtcctacaacagtagcagtatgaaaatggtcagatacatacctcttaacccattgggcttaactagtaagtctatggtgtacccacagccaaaagtttaccccttactctgtttgctcatcccaaattatttctggccatcgttgcccaacatatctcatcagaggttctgcaacaaggtcaaatggcgtctatgagatattctaacaatgagagtccaacatagcacatgtcccaaatgtaaaccctctcccatgaagaattacctgcagagacaataaagttcaaaattctcctgatcagcctggacaacatagggagaccctgtctctacaaaaaaataaaaataaattagccggtgttggggtgatcggactcaacactaggccgtgggcgtgatgaagtccagcggagtcaaaggaatgagaaaagacagtttgagagagaaagtgagttcagggggccatcgctaagtatggaggctgtgaaggccccgagctctggaagcccagactatttattggtgatcaaagaaacaggtggtgagaatgtggggttgaaagggcgcattgcattaagcacaagatttacagctgtgatggtttagcatatgctctgctacttgagataatggagagcaggttcttttaactcaagatacaatcaatcctgggagagcaaggagcaaggagccagcaagtctagacacattccagagccacgagccctggattctatccgagccacgaggggttttatgccctgggctgagattatggtgcatcagggtagccttctaccctttaccacagagcttggtgttccaaaggccacgaggggttttagaccctggaccccggacatgttccaagacttttacattatgtcagacatgcaagccctgcctcagcttctctcccaacactcagcttttctcccaacaagctaggtgttcacctgtagtcccagctacttggaaggctgagatgggaggatcgctggagcctgggagggcgaagcaacagtgagctgtgatcgtgccagtgcactctggcctgggcaacagagccagaccctttctcaaaaaaataagataaaataaaattaaatctcccggcaagctgaagctcaaaggcattagagaaaggccgtgccccccacctccgcccccaccccccaaagtcttttgatcttgtgagctaatgttggaagaaactgaagtccccaatcactctctccaacctcctctctgctcccactcagctagatgttctcgatggcttgtgggcccagaggtctgcagtctagaccaccatccacaggaatgggtgctgtttattcagtgcctcggcagttgggttatttaaatgccaactcactgtgagtttcccctttaaagagttcataggatgcacaggaatatctagccccggccctatagccaccaaatgcagaagacaagccagtgtcccatcccagtagaattatgttcccagaactcagtcccacgttgccccagaccctatcagaatcggtgatctctaattggtatctaagttgagggaggtgtagaaagtctgggtaattttgagagctgtggtacctgagctattgctgctttaggatgtctagaaatttgcaaaggcaacagccacagttactgaggtgtcatttgcggtgcctttctttcgaaatgtttggtttctattggaatcttcttccctttccattcctccctcggggccctatgccaaggcaatcctggccggaaagctgcctgccgaaggcgccccaaggtctccctgagcaggcactctcagggcgctccatcgtcccctgcctgccggccaccgccactctagactgccaaccccgcgtccaccaccactgccctttccaggtacaccagtgcatgggccaatgccacctgggcctccaggccatctgtctcccacagtgtccttgggtttctgctgttggctggctcagttcaggaagtctcagcaactctggaacagtcccgcatgcttcccacttgcaaggcaagatccctcatagggcacctcccaaagcctgttccctgggtgctgagaacaatagggtttccatggcctgtgcctccattataagcagaagagctctgttttagcaactgtggctgacgtgagacgggtgcctgagaggaggaagggggaagagcaaggtggaggggctggaaaggtaccactgtgcggtgttgggagcccctctgggggtggaggcagaggcagaagctactggagtgattcgagggagagtgtgtgattctaagctcagacagggctgtctgggggtcctgttttctgttttgtggtttcccgtaagaagccgagctggccctccaaggattggaagcttctgaggcctggcagtggcattggcctgtgcactggtatacctggaaagggcagtggtggcagacgcagagttggcagcctagagtggctgcagctggcaggcaggggatgatggagcgtcctgaccgggctgggcagcggtgacctccgtcctgctctactgagagggcgaccgtgctgcaggctggacgttgggctgcaccccagtcaggagtcattgggatgtggctacactcgcctggggtgacgatgggattaggtggaaggttaggtcagctgagtggtagcattcttgggttctctgactctgattccccacctcactccctgaagatgactcactcactttgatgactgtggttttgcagattaaatgtagaggccttgagagccccgaagaatgccccctccgagttattacaaagaagcacagaatcccagcccagtctctctgtgtgtgtgtgtgtgtgtgtgtgtgtgtgtgtgtgtgtgtggtggcggggcaaggggagcagtgtttcaaaggccaccaatctcaggccccattgcccactttacatgtctctctagcaaggcgtgggcacagaattccacccaagccaaccctctaagtttctggcctctggagtcagcctgagacccattcacacgctggtaattgcatagcgggagctgccttttcagcagatctgactgaagcaacattgcccagacctatgccatctctagggttggcacataagacataaacggtcggggtttgggttccgctgggaacctgaggaactgagtgacctggtgaagtcactcccctcggtgggtgagtcccagtacggccggccggtgccttcctggcctctcctgggactttctgagtcccgtgttcgcctctatttaaggcaagttgcagaccttggtgactcctcgaaggacactcccttcctaagagctgccagcaaattcttctgagggctgctccctgtggtccagacaggctggaaagccaccgtctgagctccaggaagccactgggccccgccactgttcacccgaggatgggctactctcactgacagcagatggttctcaacggaagagtctcctagacggggctgctctctggatttctgcccctcccaggtcaccccaggcctcctctccaggggtgctcaggggagtgagaaaagccgggcatgccgtgctctatgccaggatgtgctctgtgccatgggctgtggtaaaaaagaaatgccagaagccacttcaacagcaaagtactcaaagactgatgaaattatgatttattttagttagattttatttttgtttatgtgtattattactttctgttattagtattaatctataattagttaaattagagcgcattcatactgcggaatacagcagctacaaagaatgaagtaagccagtaagtgctgactgaaaaccgctcccagacatttcgttaagtaacaaattaaattactgcaataagggtgggaagtttgtagactatgatcccattgaatgtttgcagtgggtgagtgtggtgtttgtgcacatgcacgtgtgtgtatgtgtgtgtgcgtgcgtgtgtgtgaacacgtgtgtgtgcgtgcgtgtgtgtgaacacgtgtgtgtgcgtgagtgcgtgagtgtgtgtttgcatgcacagtaccaagcagggaagaaaatgtccctggcagctaagaatggttctctctggagagtggggaaagacggaaggagcaggaaccttcactctgactttcacgtcttacttttcaagtgtctgcatgctgtgtgacttttaccttcctttttgtgtctttcagtgttttcaaggtttagggcccaaaggaaacaaaacacacaccatgtctccgcagcgtggtgcagagaaaagagtggacatgatttgacgtggcaaagctacagccaagggcacgagtccaaggaagacacacatgaacccagaaagcaggtttttgcctacccgcagggagggccggccagggacaatggaggggctgggggaggctgggctgggtcgcaggatggggctgggctctcgctggagggaacccctgtctggagggaggccggtcacccttccctctgccagtccttccaccctgggctcctgtgaccatagcgagaggagatgccagaggggaagcccgagctgggctgggctccgtcgggacaggggacctggggcaggagccagtggcggggtcagtagcaggaggtgggtcatccaaggaagaaggcttcctgacctagagctctaaggcgaggagtgggcacgtggccctctggggacctgtccagctcaaagactccaggtgcccttcaggtaagtaaaacaaccaagtaatcctcagtgcaacgcgaaagtggctgggaagctggaatcacagtcaccacctatgctgagcaaaaccatgattaaaatgggttttctgctttcgctgaacccactttgtggatcagtggtcccagtagaaatggctcctgtagttgacagctccactggcactgaactctccttgattcttgctttgctgaatctcgagaatcttttaagattgctgggatagagggacgcacggggagaaatggcaggcgaaacaccaggtcctgccaagggaaggaggaaacaaacgcctccccgatggatgccagggaaacagaccagccaagggtgtggtcccacaccaggtgcttgagcccctgttgtcctgagaccattccctccctgactctctcctaactctgtccccgtcactcccactcggtgacctggctcgccctttgccctctgctcttctcactctatgcctgaccctgcactaactgtagaaaatgcagaaatgagaaacagacattcattcaacaagcatttattcttatatttatttatttatttatttatttatttatttttatttcttgagagacagggtctggccctgtcgcccaggctgtagtgcagtggtacgaccatagctcactgcagcctccacctcccgggctcaagcgatcctcctgcctcaacctcctcagtagctgggaccacaggcgcatgccaccatgcccggctaacttaaaaaacatgtttttggtagagatgggggtctcactgtgttgtgcaggctggtctcgaactcatggcctcaagcaatccttctgcctcagcctcccacagtgctgggattacaagcaaaggctctgaggcagaagtgtgcctggtgtgttccagaaagggccaggggccctgtgtggctgcatcagcgtgagcaagggcaagtgtgggaggtgagaaggccagagaggaaaggctcgatcatgtcgggactgtaggctgccatcagggctctggctttcactgtgagtgagggaagcccactggacagcttagagcagaggactggggccacctgacttgggtttaaaagccgccagctccagccatccagccatggggctagggtggccggctgcacctgggccatgtttgggcagaggtggtgggacggggtcacgggacaatgaaactaaagactcaagctctgggtgaatgaagcccgcacttttggaccaggttggggagccctatctggaaagagctggtccctgtgcccgttctcctcctccctttcctcctgggactcccttgcaggctcactcctccctatttggattcttatgcacagaagactcattcgctgctttttctaccatcgcagcttttgagggcttatcagcaaggactcaatccctgtcttagtctgtttgcattgctatagaggaatacctgatgctgagaaattcataaagagttttatttggctcatagttctgcagctgtaagatgggtggtgccagcatctgcttctggtgagggcctcagaccacatctacttctggcaggaagtggtggaaagctggcatcacatagtgagagaggaaggatgagtcattccacctggaatctggggtgaagtcaactccagcagaatcaaaactgctgaagggaaagggagggagtggttctaggggaaatatgcacactggtacaggggaacagaggttgggtgacaaaaccaacaggtgccctctgctgtggcacagacatttcaacacactcagaatccacttccaatgttttgaaagaacaggactaggagagatggtttcttattcgagcagactcttcttttataaagtaaaggcatgtatttccaaagtaatacatgcttgatgaaaatatttcaacatggaagtctgagatttaaaaggtgaaggttttatttccctaaagctattgtccagtgatgagcactcttgagcgtggaggtggctttccagggagttactgtgcacatccctacatgctcatgtggcgggagcacactgccaaaacgagagtgtgccatagcctatatgcagagatctggtgacttgttttaacctctttctatgctagtacccgactatctaccatgctctctctctagcttcctcacactttttcccctggggcagttgtgcagtgatttatttaatttttctgcggctgatgaacatttacattctaaaaactatttacgtggtggtgtcattaagatgctggtggattctacctaacttgcatatccaggagtttctcagatggattcctcaaggtgagtggaagggtatgcaccctagaggaaaagagaaagttagccccagacaagcagaaggaggacctaataaatcacaaagcagacatcagtgaaacaagtcaaaggctagtaaagaatgctattggccgggcgcggtggtgcacgcctgtaatcccagcactttgggaggctgaggcgggtggatcacgaggtcaggagattgagaccatcctggctaacatggtgaaaccctgtctctactaaaaatacaaaaaaattagccgggcatggtggcaggagcctgtagtcccagccactcagggggctgaggcaggagaatggcgtgaacctgggaagcggagcttgcagtgagccgagatcgcaccactgcattccagccagggcgacagagtgagactctgtctcaaaaaaaaaaaaaaaaagaatgctattaacagctctgtaactgtaaattcaatgacttcaatgaaatgtataatttcattgaaagacacatattactaaaactaacacaagaaaaaaaggagttttatatcaattacccatataaattcataattaaaaaccttgccacatagaaaactccaggctgggtgctctattggttaatgaatcaaacatttaagaaagaaattctggctccctgaggtggctcatacctgtaatcccggcattttgggaagccaaggtgagagaattgcttgagcccagaagtttgagaccagcctgggcaacatggtgatacctcgtctctactaaaaacagaaaacattagccaggcaatgtatgccatgcttgtagtcccggctgctcgggaggctgaggtgggaaaatcacctgagcctggggaggtggaggctgcagtgggccttgactgtgccactgcactccagcctgagcaacagaggagatgctgtctcaaaaaaaattttttttaaataaggggatgaagatgtccctcttatggagcagaccgtgtctcaggtactgcagtcagccaaagaacagatcaagtggtcactccttcagtgaagaactcaccgtttctggctcctcacctccttccaaacaatgcacgtctgctgtgaattttcatccggttccccagctgatgctctcagagtcatctcgggaatcacagggatccttaaatctccatcctgtctctggttgccccatcccctccccaccccaatcctccttatacccctcctgttcctttgcttcttcggcctcttttttacttgaattattagacttttttttccctacagcgttgtttgagttccttatgtattctggtcattaatcccttatcagatgggtagtttgcaaatagtttgtcccattctgtgtgttgtctcttcactttgtggattgtttcctttgctgtgcagaagctttttaacttgatatgatccccggttaaataatttttgacgagagtgccaatccagcagtctcctcaacaaacagcactggaacaagtggaattactcgtgcaaaagaatgatgttgaacccccatataatgcagtaagtaaaaattaacgcaaaatcgatcagcaacctaaatgtaagagctaaaaccataaaactcttcaaagaaaccacagggtgagtctacatgaccttggatttggcaatagcttcttagatatgaaaccaaaagtacatgcagccagagaaaagatagttaaactggacttcatcagaatgaaaaacttttgtgcattcaagaacattatcaagaaagttgttttaacttagttcctttaaaatggagagtactccttcagtgattagaagagccagaagatggaaacaaagaacttctattactcacaggttatggaggctacacggaggtcattcaacatgtgcagagggcgtgtgtggacctggggcacttgcctctatttgggtccagggagatggtcagagcatcacagtagggggtgagaagattggaggattcaaagcaaatgcccacaaaaaggggctcccaccacgtggacctaatctaactttacatttggtcaggcagctgggtgcgtgtgtgtgtactggtgagatggcttttaggggaaggaaagtggaatcgaagggcagcggttgggaactgggcttaggctattaaccaagggcattgtgtgacatctggggactcatgtcaagacaacaaaatggatgccaggtcagcatggtaatattaagcctcaacacaaaagtgaaaagacaagctgaggaaagtgagaaaatatttgccaatcatatctgataagggtgtagtatccataatatacaacacactcctaaaactcaactcgtaatatacaacacactcctaaaactcaagcaaaatgataaacagttgagttaaagaattgacaaaagacttagacatttctccaaaaaacatacagaaatgaccagtaagcacatgaaatgatgcttaacatccttagtcattagggaaatgcaagtcaaaaccacaatgagataccacttcacagttaagttactaggatggttacttaaaaaatagaaaatagtaagagttgacgaggatggggagaagttggaaccctcatctattcccgactggaatgtaatcgtgcaggcactatggaaaactgtttggcggctgctcaaaaagcacaggtcctcaaacagatacttctgtgccaatgtttgttgcatcattattgacaatagccaaaaggtggaaaccatccaagtgtcatccatgaatggatgaatggataaacaaaatgtggctgtagtgagctaggatttcaccactgcactccaatgtgggtgacagagagagaccctgtctcaaaaaaaaaaaaaaaaaagtgatcaggctgacgccacctgaacctaaatagcatcacaataaagacaaagaaagatgtggtgcacttcctggtgcaatgtaatgggaaagcacagtcccacctggagagtggtcttggccaaaaagaaaaatgttttctatttctcgaattcattatattttcctagcacaatgtccagttaatcgttttttaaatttactacagtgaatttatcttactgtttttcaaatctctgctatacctatagttatatataatctttccattcctaacatttttattatgacttcttttttttttttttttttttttgaggtggagagcaaaaaaggatccagaggagaaggaagccgctcacaccctccggggcaggcatgcggaggtggcatttgcctggcttcctgctgggacttcctcacagcgtgcccacgtctcttggaaaaactcctctgctctgagacagaaccggctttggcacggcctggatgtaccaacccccctcgccttcctcagttgtgcagtgatttgttcagcctttccgcagctggtggacatttacattctaaaaactacttacgtggtggtgtcattaagatgctggtggattctacctcatttgcatatccaggagtttctcagatggattcctcaaggtgggtggatgaagggggccagcccctccacacctgtgggtatttctcatcaggtgggacgagagactgagaaaagaaataagacacaaagtatggagaaagaacagtgggcccaggagacggcgctcagcatccggaggacccgcaccggcaccggtctctgagttccctcagtatttattgattattattttactatctcagtaaggggaatgtggcaggagaacagggtgatagtgcggagacggtcagcaagaaaacatgtgagcaaaggaatctgtgtcacaaataaggtcaagggaaggtactatgcctggatgtgcacataggccagatttatgcttttctccacccaaacatctcagtggagtaaagagtaacagaacagcactgctgccaccaacatgtctcgcctcccaccacagggtgggttttctcctatctcagaagagaacaaatgtacaatcgggttttataccgagatatttagttcccaggggcaggcaggagacagaggccttcctcttatctcaactgcaagaggccttcctcctcagcacagacccttcacgggtgtcaggctgggggacggtcaggtctttctcatcccacgaggccatatctcaggctatcacatggagagaaaccttggacaatacccggctttccagggcagaggtccctgcggctttgcgcagtgcattgtgcccctggtttatcgagaatggagaatggcgatgacttttaccaagcatactgcccgtaagcattttgttaacaaggcacatcctgcatagccctagatcccttaaaccttgattctgtacaacacatgtttctgtgagctcaaggttggggaaaagttacagattaacagcatctcggggcaaaacaatcgttcagggtacaggtcaaaatggaatttcttatgtcttccttttctacacagacaacagtaacagtctgatctctctttctcttccctgcatatcccccttttctttctgacaaaaccaccatcgtcatcacggcccgttttcgctggtcactgtctcttcggagctgttggatacacctgtagactaacaacagacagaacagacatacaaggattaatatgaaatttacaatagtggaacttctgatagttttaacccaagtgacggcattaagatttgtgaggccatcagcagctttcacaattgcctcagtttctggcaccagatttaaatgggcttttgatgcctcaaaaatttgttcttttaattttgaaatatctaaagtaagattatcttctcttccttgtagatggcatctaaccatggcccagtgatgctcagactcattgtaggctcagggtgtaatacaaaaatctgacgtattccagtcacactgtaactgaaaaagatatttcaagctcatgagcctatctgccatccaaatgacagtttgtctaagatcattaatttggtttgccaatttttgatctatttgggtctgagaattccacaattttgaggaattcttttgccaattatttacatattttaccatttgaacagaggagtgtaaagcaattccagcagccacagcagtagctgtgactgcaacaagacccataatgactgcaattaaagtaaaaatgaatcttttggatctagttagaactccttttaatacttccattaaaatatggacggatggggaagcctcccacggtcggtccatggacacagggatccacacgccctctcttgccctcatcagcagaatacggtgctgccagtcagaagtcgaatcaatgcaagtaaacaatctacaattttcacaggttatagtttgggaatctggtttaataactatttttcctacaactagcatataagggggttttacacaactttgcaaaggaattgtcagattggaatttaagttaatagtataatatggcttacgatctcttgttcctatagcttcatttccagaccaaattctaatgtggtgcgaggccacagtaagcttccataattctgggtgttcaggaccaacaacaggactaactaactttgttcgaagtgatgaaattcccttttcacccgatttccatggatagggtgattctaaccttctgtaaacctggtccagcctttcagttaaatcactatcataggccggattagtgggccagatggatggggcctgtgaaaatgagtgagtctggcccgtacaatcgtaatataattggcctcgaggggcccagtctataatagttccaaattcattgttttgtaataccacagcagtatcagccacacattcttcccaaactgagacttctgggccttttgattctttgggaatttccttggggcaaggcttcctcttaggcctaaattttaatgatctttgataagaaggatcctgtaaattatttatctgtggcccgagtgacatttcacttaccatgtgataagtaaatctattgctggcaatgacagtaggtacttctaccaaccaattttgggttgtaggcattaaatatcctggtgccttccctaggcaaataggaggataatgatacccaatggaaatatttatcatcattccttctttttcaggttgggcagggcaacatcatctgtggggcctggtactcatgcactattattaacacatactttaataggattatctatccatgtgactgcccgaattaagggcgggaaaggcacataggtccagtaagtataattagctgcagctgctcctgcagacatggggacacttaccaccattgatacaatcatcaaaactgcaagcagcatattctctggagtttgtgttacccttgttttcttcaggcttttttcagctaactgtgtcaacttctttagttgggcccaggtcggcggctccacttccttggtggatgtcaacttcatctgttcttctgataccaccattttgttcacctggagagtccatgatgctcaattgcgggttttctgtctccgcggaggcgcttttctttgcatctccgatgggttcattgtagaactttaaatgtctagtgggtatccaaacaggaagctgacttttttcctggtgaaacgcaagcaaagcctctcccccatgttatcaccttccctatttcccatgtcttatttttgatgtctttccaccaaatcagttttccttcatgtgggctgttctttttaccagtaaaatgttgttctgcagaagtagtggtctgatttctataaacgtttaaaatttttaaagtatagagtgctagattgagttgcatctgaggagtgttatactccttactatctttttcctttttttgtttaaccaattgagctttattagttctttcaattatggcctgtccttgggaattataggggattcctgttgtatgtgtaattttccactgatttaggaatttttgaaatgttttactacagtatcctggcccattatctgttttatttttttttggaactctcatgacagcaaaacaagataataaatgtcttttaacatgggaagtactttctcctgtttggcaggttgcccatacaaaatgtgaataagtgtcaacagtcacatggacaaatgacaattttccaaatgaaggtacatgtgtgacatccatttgccataatgcattaggacataaacctctgggattaactcctgcctcctgagtgggcaggtgtaggacttgacactaggtgcaatgctgtacaatattttttgcctgtttccatgtgatatcaaatttattttttagtcctgttgcatttacatgagtcaaggcatgaagttcttgtgcttctatgaatgcagatgatactagcaagtcagcttgttcatttgccttagttaaaggccctggtaaattagtatgtgcttgaacatgagtaatataaaatgggaaatttctttttcttacagtttgttgtaacaaattaaacagctggtgtaaccgatcatccatactgtatttgactagggctgtctcaacatcctttgtagcctgtactacatatgcagaatctgatacaatgttaataagctgattaaaatcttgtaacactgaaatgacagcaaccaactctgctctttgagctgagtgatattgagtttcagtgactcgtttttttggcctggtgtaagccacctttccattgctggaaccatcagtaaacactgtcagagcattttctaaaggtgtatgtctggtaattttaggtaaaatccaagtagtcaattttaaaaactggaaggtttttgtttttgggtaatgattgtcaataattcccacaaaatcagcaagaccaatctgcaatgcaccagaattgataaaggcttgtgtaacctgttccttgtttaaaggaacaatgattttatctgggccacttccacacaattttactattcgtagtcttgcctgaccaattaatgtagccatttgatccaagtacaatgtaaaagtcttaatagtactgtgaggaaggaaggaccactccacaagatctgtattttgaacaatgatgcctgttggagagtgtgcagtagcaaaaatcaaaagttggagtggggctaagtgatctattctatttacttgtgctgaccgaattttgtcttcaactaattcaatttctttgttgcctctggagttaatgttcttttactatttgattctggatcccctcttaagatagagaacaaatttgacatggcataagtagggatgcctagggttggccgaatccaattaatatctcccagcaatttttgaaagtcatttcatattttaatgtgtcttttctcatttctatcttttgaggattaaccttcctttcctctacctgcgtttctaaataatgaaaaggagctgttgtttgaattttatcagatgctattgtcagtcctgcgttggcaacctctgtctgcagaaatgtgtaacagtcaattaatttgtctctcatttctgcagcacacaaaatatcatcaacataatgaatgatataacagtctgaaaacatgtctctaactggttgaagagcttgagctacaaaagtctgacaaatagttggactattaagcattccctgaggcaacactttccactgaaacctggtggctggttctttattatttatggctggtatagcaaaagcaaatttttcaaaatcctgttttgccagaggaatggtaaaaaaaaaaaaaaaaagcaatccttcagatcaattataattaaaggccaacatttggggatcacggccggagagggcagcctgcgttggagagcccccatgggttgaattacggcattagcggctcttaagtcggttagcatgcgccatctgccggattttttctgaattacaaacactggagaattctaaggagagacagtgggtgaaacatgtccttttttaaatagtttttttaactattttatgtagcgcccctaacttttccttagggagcggccactgtttgacccagacaggatgctacagggcgagtctgaattgctccttcaccgcagtgaactgccggttgggcaataatgggcaccgcgagccgagttgcagccagcctggtttcaggcttcctcccccagcactcactcgactgaggaggaggtggccatcgtggttttagccctgatggccccgatggttctggacctccttcccccagttttggtgattcaggatatactacctcctgtaattgattgtagtcaacattttgtgttgaccgagccattacagactctgctacattttcacaatgtgaactttccgttcctttcttgaactctgtccccgcctcttcttcacaatctattacacagctttcaggggcatcagaaaccaaaacgctatcttcttctgtttgaaacggttctaaagctgctttaataatggcccaatcattgcatactgtaagtgggatgattttgccttccctacttgcttgttttaattctttgccaattttttcacagtcttttagatctaaagttccctgttctggaaactatgggcagaattgttctattgtttgaaatagcataattagattttctgtagaagctctaactccccttcttcttaaaagaattttaataaagctgagataagaggcatatttactttcagtttgtcccattgttaccctgggttcctctgtgtgcacaagcttaccgcaaggctcaccgtggacgtactcaggaatctctcatcgactgtcctcaatgctcacggtcttagcgtaccttcaccctagagaaaggccccacgttgggcgccaaatgaagggggccagccccatccacacctgtgggtatttctcatcaggtgggacgagagactgagaaaagaaataagacacagagacaaagtatagagaaagaacagtgggcccaggagactggtgctcagcatccggaggacccgcactggcaccggtctctgagttccctcagtatttattgattactatttttactatctcagtaaggggaatgtggcaggagaacagggtgatagtgtggagaaggtcaacaagaaaacatgtgagcaaaggaatctgtgtcacaaataagttcaagggaaggtactatgcctggatgtgcacataggccagatttatgcttttctccacccaaacatctcagtggagtaaagagtaacagagcagcactgctgccaccaacatgtctcgcctcccgccacagggcgggttttctcctatctcagaagagaacaaatgtacaatcgagttttataccgagacatttagttcccaggggcaggcaggagacagaggccttcctcttatctcaactgcaagaggccttcctcctcagcacagacccttcacgggtgtcgggctgggggacggtcaggtctttcccgccccacgaggccatatctcaggctatcacatggggagaaaccttggacaatacccggctttccagggcagaggtccctgcggctttgcgcggtgcgttgtgcccctggtttatcgagaatggagaatggtgatgacttttacgaagcatactgcctgtaaacattttgttaacaaggcacatactgcacagccctagatccctgaaaccttgattccatacaacacatgtttctgtgagctcaaggttggggcaaagttacagattaacagcatctcggggcaaaacaatcgttcagggtacaggtcaaaatggagtttcttatgtcttccttttctacatagacaacagtaacagtctgatctctctttcttttccctacagctggaagggtatgcacatctttcccttaatagaaaatgccaaataaatgtccagatagatgttactaccactcctactgacagcgtatgagtcctcgtttccaactacagccttgccaagcattggagattgtcaactaatattattaatcttacattaaaatctgctatgttcccaccgagcaaatgctaaaacaaaactcaaagggatcaagttgtctccgagcaacttaagagcatcccagaacacagctcaagcatatgtctgttttgctttgacaaacagcccctttccaacctagctctgcccaagatggtgccagcgtgacctcccggcagacaagacacctcagcatgtcatgcagaccccacagctgcctgctccctcccctgcctaccattcacgccaagtcctcctttaaaaggccctgctttctgcccccagtgggaagcagcacccttaaaggcaggagcctgtacgtcttcccctaaaccaagcatggcagaaagtccgtttctttatagcagaccacactcttgttaattggatctccaagcgatgagggaatgaacctgtgttttggttatattacatgttcacaaagattttagattatttgaattactattatcattattttagaggcagggtctcactctgtcactcaggctggagctcaggggtgcattcatagctcactgcagcatccagctcctggactcaacacatccttccacctcacacctcagcctcctgagtaactgggactacaggtgcctgccaccacacccacctaatttaaaaaaaaaattttttttgacagagtctttttctgtcaacctggctggagtgcagtggcatgatctcggctccctgcaccctccacctcctgggttcaagtgattctcctacctcaacctcccaagtagctgggattacaggcacacaccaccacaccctgctaattttttcttttctttttttcttttcttttttttttgagacagagtcttgttctgttgcccaggctggggtgcagtggcaccatctcggctcactgcaacctccaccttccaggttcacgtgattctcctgcctcagcctcccaagtagctgggatcacaggcgcacaccaccacgcctggctaatgttttcttgttgttgtttttttgtgtgtgtatttttagtagagatggagtttcactatgttggccaggctggtctccaactcctgacctcaggtgatccgcccgcctcggcctcccaaagtgctgggattacacgcatgagccaccgcacccggccttttaatgatttttctacagacagaatcgcgctacattgcccagggtggcctccaactgcaggtctcaagccatcctcctgcctcaagcctcccacagcgctggaaatacaggtgtgggccaccatgcccaacccatatcacatgcttaacagtgatatgataatgctggttctatgcatctattcaagtatgttttcaaataatttttcccaagtaaaaaagctcatatgttcaacgaaaacaacttgggaaaaaatttaatgctgacctgggaaaacattatatatgctactgtcatatatttaacgtataaatgcaagtatattgaggaaaatattctaaaatgtccacagtagttaatgctgaatggcgggacccagtggcttttcattttcccccatttcccaaattgcctcccgttaccttgtgctacttcaatctgtgaatcccagagcctcccctgcaacccgaggacaagggcatgcaagtccgaaggtgccttcgctcgccgaaaagagactcggacacggaatcgtagctcagttttattttctacagaaacaaacatgtaagccgtcctcctccagcgacaaacaatcaggcccccacaatgaactggccactcgtgctgggaccattccctaggggaggaggcatgacctaggaaggggcgccaggctgggcttagcgcctctgccctgagggaggctgagccaaaaacacgggcagaaagcactgcgtgatccacatcaacagggaaagctgctggagacaggagctgatggagagctggagttggcggtggtctgcagccatgagtcggctaaatgtgaggggcaaagaacattacattaaaggcgacacctctgcacccatctccctgggctccctcgggtggcggcgggcctggtgtaccaggtctctgttctgagaccctgtgctggcgtgttcccaggtttctagcagcctgaccgtggggtgtaggcggatcccagcccccaccctgccacgctgtgaccgccacccacccaggccccatccctgtcctggtcctgaactgacacagtcagtatgttgccgcacacagtgaactccttcagaagcacccctggcacgggaagcggtggggcatcccgggccaggctcctgcgggccagctctgcttccatgggtgtcgcgaaaggcatggtgaggtagctggtgggggcccagttaaggcatcctctcctacgacttggcctgtggctccggcctgctgcttaccccaggccagcttccccctcccccactcccccacccccgattgcccagctcatccaccccaggctgtctccccaggcactggcccagtagcacaccccacccagctgtcttggttccccactttcctttgctgcaccccaagctgactcctccgtgcccttccaagacccctccccaccctgccccctgtggcatcacccggccccctcctcatcactcgaccctccatcccaaccacctcccgccacccactcccatcttgcccccttccccccacctcctgatcccctcctacacctgggtccccctatctcctggcccctgctcccctccccgcatgacccagtgcccctcacccaatcacccagcccctctcccccacccccaccccctctacctcccagcccttacctcctcccctcctcgcagctggcctcccatatccccacctcccaacccccacccccacccccacccaaccacttactcgcatctcccccgcctcctcccccacctggccctgccctccccatctcccggcccccacctcgccaccagaactgtcagaacagaacagaacagaacaggatacaactcaagcaggcggctgtccggcctcctggccccgcaggggcaccttccatcctgtgcacaagcggcaccgccatgcggaccccgcggggcgcctcctctcggccccgaggcccttgctgcccctgcgccccggggacctctgccgcccgtggcacccgcctctcctgggccgccagcattgccccctgggccatcaggaatgccagggcctcctgggccatcagcatcgcccgtcgaaccccctgtgccctggcctgcggcctgcatggctccggagcctctgcgcggctctcagagagaaggtcagggcccacgaggatgcggaggcagagaggctgcaggaagttccgccccctggcgtgagatgggcagcccgggatcctcagggcgcctgcgcacaggggccctacttccggccctgggagaccccgagtgagccccggagcacgtgaccggttctcaccaaccccgcccctccccaagagagtccgggccggaaggtggccgcaatgccagcttggacccctcacccctgagcagccggctgtctgccggacccctgtcccgggagccctgcagggactcaggcactgcggggcccagcctgtcccatcccccgggtctccctcacatcgaggagcaagacgggcctgggaacacggggccgggactgtgcggccatcgtcccggaccctgcctgccctgtccgtccttgggggagcgcccaggacagaccccggggggcaggcctctaactgggttcagcagcctccgtccctgtcctggtcgcccagctggtggggtagctggaactgcatgtctggtgggcgtggcctcgcgccagccaaggtctcccaggcgccaggtccagccaaggtggacgggagggcccagcgggacccggggccggatctcactcctgggttcaacgggttctgtccctgtcctagtcgccccgcctggtgggggagctggagctgcgtgtggggtgggttgcgggtggcctcccaccagccaggggctcccgggctctaggcctggcccaggtggacaggcgggacctgctggacctgaggctgagtcgggcctggctcctgggttcggcagtatcagtccctgccctggtcgctcttgcctggtagggagctgggaggtgaccctgtgtctgctcagtggtgatctatttgtgtgtctggaagggggtcaaatccacgggacaggtacctctagaggcatgcaggggtgagggcggcacggccccgggagctgaatgtctgtgccaggcacacctgtagcaacaggaggtgaccagacagggcctagccctgaggaagggggaggtactgaaatccaaaccactctcccccaccttccaaatccaggaatcagcagcctctgcacctgggaaaagcatattggcactcatgtggaaactaaaaacgttgatcttttggaggtagagcagaatgatggttaccagacgctgggaaaggtggggagggtggggaggttaatggggacaaacatatagttgcatagaaggattaagttctagtgtttgatagcaccgtagagggactataggtaattatttattgtatatttcaaaatagctaaaagataggaaatgttccccaaaaaaagaaatgataaatgcttgaggtggtggagatcctaaataccccgacttgatcattacatcgtgtgtgcgtgtgcatgtatcagaatatcacatgtatcccataaatatgcagagttatcatacatcagttaaaaatgtttttacttacagaaaagaaaaattcacccaagctcttgcgtgtacctccagtttattattttcactgctgtatttcattacatatatttcattaaatgatgaattttaaaaaccagagaacacaacttgttaacacaattacacctggaatagctgaaaatcagacataacccagttagtgattgccatccttcctgtcgtcctctgctcagtctccccattctcagacagaggcaggctaaagttcttaccttcaacaggtcagggaagggagagtaaagtgcatgtgaccctgtcttaggaagcaggaagacagagggagggtctccgggtccccattattttcccggcctattatcctcagatcaagtcaagaaaggaagtcctaactgattgagagattcctggagatactgccactgtcctggaagtctcagccagccactggaccggaaatctcctccatcaatatttcagccagagcaacacctgccactagatggcatcaaactccagccgggagcaggacagatttggatggtccagcgggcttgcctcattcatttcattaaccccacagtaacacattttcacattgtatgtgattggatttcttggaaactacctattacattacggcagagttttatagtcctctaatttaaccattctgctgatgatgggcaggcatttggatagtttccagcccttggctatgaacatgcttgtacaggtctcttgaagcacatgtccaagtttttttttggaattgctgtatcacagccaatacatatctcgaaatttactagataatgccatgttttcccaagtggtttgagccaattttcgcttccaccataatgtgtcagcgtacatacacatagctcaacattctcatcaatattgacggtactagtccgttctcgcattgctataaaggactacctaagactgagtaatttataaagaaaagaggtttaattgactcacagttctgcaggctctacaggaagcatggctggggaggcctcaggaaagttacaatcatagcggaaggcaaagaggaaggagtcacatcttatatggccagagaaggagaaagagaaagtgaagggggaggtgctatacacttttaaacaaccagatcttgtgagagctcaacatcatgagaatagcaagggggaaatcgacccccatgatccagtcgcctcccaccagtcccctcctccaacactagggattacaattcaacatgagatttgggtggggacacaaatccaaatcatatcattccacccctgccccctcccaaatctcatgtacttctcacattgcaaaatacaaaaatctcctctcaacagtcccccaagtcttaacccatttcagcattaactcaaaaatccacagtccaaagtctcatctgagacaaggcaagtcccttctgcctatgagcctgtaaaatctaaaacaagttagctacttccaagataaaattgaggtacaggcattgggtaaatactccctttccaaaagggggacatcggccaaaacaaaggggctacaggccccatgcaagtccaaaacccaacaggacagtcattaattcttttttttttttttttcactacaaaataatttattcgaacacacagctacagcgcgagactcctatgtacaagcacattgatgctcctgactaccctcaactggaggacccttttcttcccccttgccttgcagacctcttctatcgaatctttcatgtactggatctcctcggccagggaatccgccctctcttgcagagcctcgttcttcttttccaccgctttgcactcaccagtgaggacctcctgctccaccctcttcttctggcgatacctagttcctgctgtttggttttgctccattttttttcagcttcttatccagtttctcaccctttacttgtgctgctaccatcttctctccaggagggtcataaggtttggggcaggcagagccacagaggacacctggagatggcgggctcctactcggagagcccctggaggtagagggagagcccagacaggactctgggctcatacagatgccactatcatgatctgagggggcgtcttcctcctttgtgcactgagggatcttggaaatgtaagcagtggagtctggcttcctagctccttcaaagatatccacttcactgcccagctctagactaaaggaataatctggagtggaggactggacccctgaggaaaggggaagaggttgcaagaaggtgaagggggcaacctggtcgggctaaactttctgggagatggcaaatcgggttcaccatctggggggggcgctccttagtagtctcctggactgggggggctccttaatagtctcctggactaggggggcaaagagatcacacgagtcatccaacgtggccagaagctcatctggcagggtttccaggtcatctatacccaacagggcatcaaagtcgaactccttcagatcagttttctccaacatccaatctgtcccaaagaaagcatcctccttgccatcgttggaggcactgaccaacccatccacagccagccattcggaggagtctgccttagccttgtcgctggagaacccatgaggtttgaagtgcttggccacctccaggtagtcatctaagagacctaggctttcttcagtccccaaacctgactggtcaaggggggacatcaagcccccaccaacacctcgctgctcaggaagctcatctcggtcatggtgcagtgctttgctggaatcaacgaatgtgcttaattcgaaggtgtctttgtcggttacagcaatgctgctgctgaatgctgtgagaagtgctacggcttaagccgccggtggatgccactgcagagcctggtgctgctgccaccgctgcaaaggccaaggctgccacaggcactgctgcccctaaaacgccatggtggccatggaccctgcaggcggggaggagggaaggagcccacgtgcggaggaaactacatctgtgggcgggcagagcagaaaatcgtcattaattcttaaagctccaaaataatctcctttggctccatgtcttacatccaggccacactgaggcaaggggtgggctcctgaggccttgggcagctctgctcctgtggctctgcagggtacagccccctcggctgctttcctgggctggtattgaatgtctgcagcttttccaggagtataatgcaagttgtcagtggatctatgattcgggggtcttgaggatggtggcccccttctcacagctccactaggcagtgccccagtggggactccaaccccagatttcccttctgcactaccctagtagaggttccccaggagggctctgcccctgcagcagacttctgcctggacattcaggcgtttccatacatcctctgaatctaggcagaggttcccaagcctcaacttttgccctctgcatacccgcaggcttaacaccacatggaagccaccaaggcttacagcttgcaccctccagagcagcagccggaggcgtatctggggcccttgtagccacggctggagctggagcagctggggcgcagatagcagtgtcctgagggtgctcaggccagcagggctctgggctgggtccaaaaaaccattcttccctcttcagcctccaggcctgtgaatgtccctcaaaaaattaaaaatagaactaccatatgatccagctctcccacttctgggtatagatctgaaggaaatgaaatctatttcttcctgagtcagttttcatggtttgtacatttctaggaatttgtccacttcatctaggttatctaatttgttggcaaacaattgttcacaatcttctcatgtaatcctttttgggggtagaagaattcagtaacaatcaacaaaatgaaaaggcaacctgcagaatattgaggaatcacatattgttcacatcttatcaatataataaaatatgtgcattttgtgggggcaataataaatactctcagttttttcctcatcagctataacagggttggagtctacagtgatatcttctcaagtctccagcatctgtgtcgcactcaggtagcaccacacagtcccgagtgagcccctaacagatactcatctcccttgggacagaagcagcacatagacttccatctctggtcattaggccccatggcctagggaccatgtctcaaaattagcttcgatgccataacatatttgatcagaatataggtaatgtgataagctgaaatataagcattccaactgaacttcaggcatagcgatggcaaattggaaagagatgcaaagagatttcaaggaccttggaaattcacaatgtcatttaagaagaaaacacacgtcactccattccagtaaagaatcacagactcggccatgcatgttggctcatgcctgtagtcccagtactttgggagatcgaggtgggaggatcgcttgagcccaggagttcaagaatcacagactcttccagctcccagtccggtgctcttaaccactacgtgctgccagtcatcaatattctcccatatttcctttaatgaaataggatcattaaagcttagggggaaacatttgacaggaaaagatttcacgtatttttctagattttcatttcttctttttgttgttgtttttttttggagacaaggtctcactctgtcacccaggtcagagtgcagcggtgcaatcacagctcactgcagcctcgacttcccatgctcaatccatcttcccacctcagcctcctaagtagctgggactacaggtgcacacctccacgcccgactcattttttaaaattgtttgtagagatggcgtctgactatgttgcccgggctggtctcaaactcctggacacaagcagtcctcccgcctcagcttcccaaagtgtagggattacaggcgtgagccacactgcaccaggccgccttcatttcctcttttatatagactccagttgaatttttaaaaagtagttggtcgcccggaggcagagactgtcttatagtttttctgtttcccagagtgccttgctaaatacccaattgttgacctaatctttaaactcagaagtacaaatttactgcactgtaaagacatagactcaacaggtacaaaatctttggtctttcaatcaacataggtcatggaaacatcacttcattcctaaatgccaacgtaatgaatacaagagaattggtttgaaacaaacattttgatcagtgttcacttaaattcccaggggattcccaccttactccactccctcggctcagcacacgtattataagccacactagtccacatctggtgttacaactttctgtccaatttcagaacaccctcctttcaccaattcatgacctgcaacccttccaccaccatttccacaagcaaacttcaggtctttttcaaggtgaagtgccgtacttgctgcagcacttaagtattttttaaccatttaacatgcatagaattgtgctaccattttcattaggttcctatcttcgtttttttatgtgtcactgacaaaggttttgagtattgtgtccctaaccccatttttcctataagttttgcgatttgtactacacaatgattttgaggtgtacacgtatgtcatgctataatcataactcattgtatcacggtttggggaaaaaattaaccaataaccaatttattttttcaaagataacaggtgtgcaagcttccagcaaatctgcttaagcataagatcaattcagagaacagctgtttttcctccaatgtcgatccagtggctagctagccctcaaatcagacactagatttggaactgggaggacatcattcaccttgaagtagtgaacaaaaacatggttttgtcaaaaaataaaagggataaaagtcattataaaaactgtctttcccaccaggcatggtggctcatgcctgtggtcccagctactcgggaggctgaggtgggaggatcacttgagcccaggaggtcgaggctccagtgagccgtgatcgcactactgcactcctgccagcctgggcgacagagcgagaccttgactctaagaaaagggaaattatcttttccatcctcagagcaagcatgcagaatattattgtcatcctattcatagacgtggaagctaaaactaagagaggctgagtgactggcccaaagtaccatggctgataggggttgtaatgaactcaagtggtctttgtctaggatcagaaataccaccatcatatgtaatggtgcttgtaactgtgacgtgttatttccaattgtctgcaaaacacaaacatgaataaatgagatgagttgttggggaaaagtaagaaaaaggtgacactgttaaggttacccatctctccacgtacctcctaacatcagaccctgattggggcagaaaaccctggcctgtaccacgataaatgcctcctgtgcaataataggatgttcaacagctcttcggtaccaacgatgaacaaattttttgcaaaagaatattattgctgcaattggccgggcatggtggcttatgcctgtaatcccaacactctgggagaccgagctgggcagatcgcttgagcccaagagtttgagagcagcctgggcaacatggctgtacccactctctacaaaaaattgtaaaatttgccaggcgcggtggcgcacgcctgtggtcccagctactctggaggctgaggtgggaagatggcattgagcccaggaagtcaaggctgcaataagccatgttcatgccactgcactccagcttgggtgacaaagtgagacctggtctctctctatatatctgtctatctatatctatatctatatctatatctatatctatctatcatctatatctatatctatagcttagctatatctgcaacagtgaatagaaacccctttagcaaagtgttcccaaactcttgcttctaattcttgaccaactcagaagtaaaggaggagaatgaagtaaaggaactcatacgtttccgtgctctcatgcatatttttatttctgtaaggtcagtagtaatgtggctactttcatttctgattttagtcctcgctctctctgtcttagtccagctaaatgtgtctccgttgctctttaagcacttccttatttttctgggacaacaagatgatccagttaatctcggactttctctgccctagccctggaatcagtcatttctctagtgagctctgttctttttaatcaagacggttgtttagaaatcgagacccaggcactaagtcaactcactgctattgagatgg

SEQ ID NO: 316 - DNA, 31737 bp, Homo sapiens
cctctgatgctatcgtctcatctggaagagatggttgacccagaggatcctgataatgtgcaatcaaaccatttgctggccagcggggaagggacacagccaacctttcccagcccctcttcagagggcctgtggtccgaagatgctccatctgatcaaagtgacacttctgagtcagatgttgaccttggggatggttatataatgagatgactccaaaactattgaatgaacttggacagacaagcacctacagggttctttgtctctgcatcctaacttgctgccttatcgtctgcaagtgttctccaagggaaggaggaggaaactgtggtgttcctttcttccaggtgacatcacctatgcacattcccagtatggggaccatagtatcattcagtgcattgtttacatattcaaagtggtgcactttgaaggaagcacatgtgcacctttcctttacactaatgcacttaggatgtttctgcatcatgtctaccagggagcagggttccccacagtttcagaggtggtccaggaccctatgatatttctcttctttcgttcttttttttttttttttttgagacagagtctcgttctgtcgcccaagctggagcgcaatggtgtgatcttggctcactgcaacatccgcctcccaggttcaagtgattctcctgcctcagcctccctcgcaagtagctgggattacaggcgcctgccaccatgcctagcaaatttttgtatttttagtagagacaggattttaccatgttggccaggctggtctcaaactcctgacctcaagtgatctgccctcctcagcctcgtaaagtgctgggattacaggggtgagccgctgtgcctggctggccctgtgatatttctgtgaaataaattgggccagggtgggagcagggaaagaaaaggaaaatagtagcaagagctgcaaagcaggcaggaagggaggaggagagccaggtgagcagtggagagaaggggggccctgcacaaggaaacagggaagagccatcgaagtttcagtcggtgagccttgggcacctcacccatgtcacatcctgtctcctgcaattggaattccaccttgtccagccctccccagttaaagtggggaagacagactttaggatcacgtgtgtgactaatacagaaaggaaacatggcgtcggggagagggataaaacctgaatgccatattttaagttaaaaaaaaaaaaagcaaacacaaagatgcttcaagatcttcaggagaagtatggtatacaagtttcagggaccctatttgacaattttcagagtgctctctatgctgattccgagtcgagtgtgtcagctgtgattacagtgcctgtggatctaggccgggttgggggggtgtgggcgggggaagggaagtctggcccggagcaattgctcctgccggtaaccccagcactttgggatgcctaaacaggcgtatcgcttgaggccagtaattcgagaccagcctgggcaacatggcaaatctgtctctacaaaacaaaattagaaaaattaactgggcgtagtggcatgtgcctgttgtcccagctacttgggaggctgaggtgggagaatggcttgagcccaggaagcggaggttgcagtgagccaagatcatgtcactgcacttcagcctgggtgacagaaccagaccctgtctttaaaaagggagttggtggggagaggttctagaatgtcatgtagcaaccagtttaaggactgggactcagggatccaactcccacagtttccctgtgtgaccctaggcatttgacttagcctttctgagcctcaggttttttgtttctgaagtaaaaggattggactaggtaatctccaagatcctaggaacccaggagaaagatgagaaaatgtacaagaatgaacactcaggtggaaatgctgcaatcctgagaagctcccaggatgaatgaaaggcacaggacctcttacccctcacccctgcccccctcaagagctggtttctcaaacctttctcttaggccccttcaaagggggaaaactaaaaattatacaagttatagttcaaggactttaaatagattatttatatgattgctcataaggatgaggctgtgaggagggaacaccttatttaatctaatgaaattccataggaaagaggccttttgtatattgaatcaatttatctgccttctcagtgcatctgtcatattctgaaagattctgggttgatcttttgcgataacctctatggctgtgagtgtgtgtgtgtgtttgtgtattttttaacattttgtataatgattggaggttggtaaaaagtaacacaacagtacttttttaatacaaacttggtgtggtcttgagttgtcttccattggagagcgtacgtgtgccacagattggtgcacctgccggcatctctaggattgcaccaactccctctagctcttcttggtggcctgcaggggcctagggcgcattcacttccctctgcttgactttacgtggtgttctagcgtcagacatcaggcgatgccgtgcattacccaagacactggacagctccggatcttcccgtctaaccactaatcaagttaaaaagaggaaattaacgctttcttagtagtctctgaaagaaactagttatttgcgtaaagatgacttggttttgtgttgtttatccctggggagaagggtaaagaagaccctcaaactggatttgctgctgaagtgcttttaactcacctgtgcggagagcggacttcaagagagggcgtgccggtgctccggacaaaacctggggaatactgaaagccaccaccaccaccgtcattccagcatgcagatctcagtcctgggttggtgttgtagggcatttatttatttgacttgacggcgcctttcaaagcttgcgaggatcccttcctcttcctcgtgtgcatctgccaagcctgtgccccgcgcctcgcgggtggacccgggctggtgggcggggcctgcagcggggtgggagcccggtcgcccggcccctccccaccccgccccgcccatctccgctggttcccggaagccgccgcggacaagctctcccgggcgcgggcgggggtcgtgtgcttggaggaagccgcggaacccccagcgtccgtccatggcgtggagccttgggagctggctgggtggctgcctgctggtgtcaggtgaggggtccgcggggagggggcgcgcttgggaaccggaaggccccgcgagatgccgcccctgatcccatccctgggcgccctgcaagtgacttaagagccttcggggcctcgggagagaagatgcaaacgccacggccggctgctgagacgcaactaggctgctgctgccgtcgattctgtaacaggagaaagccccatccgcgcccggattacagaccgtctgggccctaaactcagggggagactcccggcgtcttttgattccctgtcctcctgcagctctctgctggcgggcgtctaaataaagtagcttccccaaaagacccaagatcccaccgtggctgtcatctgacccttctggagactatcagttcaagtggaggcccccaccagtccccgagtgccctgacagccctccctgaccccaagtctgccccctcagtgccagccctccctacagatgtgcctcccatcacccgctgcacctcccctcccttccggttcaggcccgagcaccctgaaatctggattctgtcccccagcgccccagctccatggcttctaaacctaaatccattgaaaccttttctgtcctctaaattgactgcctaggttccaataacaccatggtcacctccttcctttctcatgaactcttccctggccttccgggatacccctccggtttcccgccctgtcaggctgtctctgcttgggaccctcctgctctgtcaggtttctatgtagctaattgtgatgcccaaggccttttctctccttccctggcactgttcctttgggggatttcagccaaaccctggcattaaacacgggctataggcccatgactcgcacatttatatctctcttggtaccagttgggtgatgggtggtggtttattatagtcttctacttttctacttgcatgtaggtttcaaattttcttttctttctttcttcttccgtttttttttttgtttgtttgtttttttgtttttttgtttttttttgagacagggttttgctctgttgctgtggcccaggctggagtgcagtggcttgatcttgcctcactgccacctccgcctcccgggttcaagcgattttcctccctcagcctcccgagtagctggaattacaggtgtgtgccactacgcctggctaatttttgtatttttattggagatggggtttcgccatgttggccaggctggtctcgaactcctgacctcaggtgattcaccttcctcagcctcccaaagagctgggattacaggcgcgagccaccatgcctggccaggtttcgaattttctattaaaaggtttgaaaataatttctgtctctagcccacatctcttcttggtgtgacctctgggctcattcatctggctgtctccctgacattcctacttcagcctctctccagcatctccaacctaatgcagctcaaatgggactcgtgagttccccagctgagctccaatcggggcaccagctgcttaagcccaaaatggacattgacctcagcttttatgcatcaaatgtatcaggaagtctccagtttgtttttacgtctggaaatatatctgaaatccatgtgcccaccctaccccctcatagctttctgccaccagacaaatccaaggctcctttgtctgtccccattttactcctgcccctccagaaatttctcctcacggctgttcaaagaaaatctagactcctcagcacagccaacctgtctctccctccctcacccacgtggcctttgaagacatggagccatagaggagaaccaagtgctggatgtgggctttttcatgggcatctgttttgaggagaaaagttgtaaatgtttttgtcttattttcatagcattgggaatggtaccacctcccgaaaatgtcagaatgaattctgttaatttcaagaacattctacagtgggagtcacctgcttttgccaaagggaacctgactttcacagctcagtacctaaggtgggtctggcctcactattggcaggaacgcaccggaggagccagccctgggctggtcactgggttgggccacaggaggaagggagtctgactacggtcaccgtgtgactgtgacaaccctcagggagcctccctgccagccttttgctgtctgggaaattctcgtggccaccttttctcttttaggttttctagttgtgatggttgacgatttgactgttaatcacagggctgctggcagatacagacattttatcatgcgtatgtagatataatcagccatagtggtaacctcatgctgtgcccatcccagcttgtttgtcacagttgatatattttaaaagaaaaataccactgctgtcatctctaggtatgagtagtattgctggaagtcagcaatgttgagtggatgctacccaagaaactgagatatgcaaagcggtcaggaagccccttgctaccatatatcacctgttcccctccaatggattataacatcatgccccagtgccatgcgcgatgcacataatttgcataatgagtgctcagtttctccgtggttccatcctgaaattaaaagtaagacagctactgactgttaaaaaccccattctcggacaacagcaggggctgtgaaggaagagtgagtgtcaccctagacggtcatctcagtggtgatctgaacgccctctacctctcctgcctgtcagtgtttccctacgcctggtgaaggaagtcagtgccagcactcccttggcagcctgccaccatacgccacatgctggactgcaggtgacacacctttaggccaggcgcaaacagcagcaggaggcccaaggctgacaagccaacacacctgctttctgtgtgactcagaaacatacgaagatagacaagtccttcagtgaggcaggaggaaatttcttcccagatccagctgtcatttcacaaaaatccccaaggcctgctacatcagagaagaagtagaaaggtgaataagatagtcctcgtctgtgcattgctggcttttgttttttaacttttagttcaaaataattccagactaacagaacatttcaaaattttaagtagaatacaaagaatttccaaatagcctacaatcagattcaccaatttttttttttttttttttttttatgagacggagtctcgctctgtcacccaggctggagtgcagtggcgcgatctcggctcactgcaacctctgcctctcgggttcacgccattctcctgcctcagcctcccgagtagatgggagtacaggctcccaccaccatgcccagctaattttttgtatttttagtagagacggggtttcaccgtgttagccaggatggtcactatctcctgacctcatgatccacccacctcggcttcccgaagtgctgggattacaggcgtgagccaccacgcccggcccaggttcaccaatttttaatgttggtcacattctctcccttcctctctctctctcatgccctttgtgctgtaatatttcactgtgtatttcacaagaacaaggataatctcttacatcacatagtacagtgagaagctcaggaacttttacattcataaaatacttgtatctaatttacagtccatagtccagtactgtcagctgtcccaaggattgaaggagggcatactctataattaatttttttcctgatgtgcattttctagtactgattggctttatcatttgctttctgtgctgtctctactcagtctgaatagccacggagattttactgtggaaaattaaatttcttctctgtctgtctgtctccctgtagtttttcttgttctgtgctgtgcttttgggtttgtttgtttgtttttcttttttttttttttgagacggagtctcgctctgttgcccaggctggagtgcagtagcgcgatctcatctcactgcaacctccgcctcccgggttcacgccattctcctgcctcagcctcccgagtagctgggactacaggcgcccgccaccacgcccggctaattttttttagtagagacactgtttcaccgtgttacccaggatggtcttgatctcctgacctcgtgatccacccgccttggcttcccaaagtgctgggattacaggcgtgagccaccgcgcccagcctttttttttttttttctttgagacagggtctcactctgtcaccaaggctggagtgcagtggtacgacctctgctcactgcagcctccacctcctgggttcaagcgattctcctgcctcagcctcctgagtagctgggactacaagcacatgccaccgtgcccaactgatttttgtacttctagcagagatggggtttcaccatgttggccgagctggtcttgaactcctggcctccagtgatccacctgcctcagtctcctcccaaagagctgggattacaggcgtgagctaccacacccagcccatgccatgcctttttgccattatagtcgaggcacttggctttgcatgtttatcttttatgttagcgatcccaatgacttcatgaagtgacttcatgagggtatccacacctgggttccaggtctcccccgcgtggaactacagagtgagtatggcatgtgctggagaaaacaaaatatgtgctggccgtgtccttggggaagatatttgatccctaaagatgtgattgcctcatgtggctctacaaaagagttgtttagagtttagcatgagcaattgcacagcacaaactctctgttgtttgcgtgcattggggcagggcgtccagagccgggggcacttcagaggatgtactggtgattttaatataaaaacatccaaaacaattagatgtaaatatgaggaatgggtcatattacctatttaatgcggggagaagtatttgtacatgcaataaaaataacctagtgaaggccaggcgcggtggctcatgcccgtaatcccagcactttgggaggccgaggtgggtggatcacctgagatcaggagttcgagaccagccttaccaacatggcaaaaccccatctttactaaaaatacaaaattagccgggtatggtggtgcatacctgtagtcccagctactcagaaggctgaggcaggagaatcacttgaacccaggaggcagagattgcagcaagctgagattgcaccattgcactccagcctgggtgacagagtgagactccatctcaaaaaaaaaaaaaacctagtgaaaaagatgttattgcaaaacaacttttgaaatactgcacatgctggacaattgatgcattagtttaaaagaaggaaatgggccagtaatcccagtactttggggggccaaggtaggataatcatttgaggccaggagttcaagaccagcctgggcaacatagcagccccttgtctctacaattttttttttttaattagctggacttgagttggaaagaaggaaggcggaagggaagaaagaaggtagggaggaaaaaaaatatggccacatgtgagaaaacccccttaatgaaatgaccgctggattttccaaatgatgggatgttaagcagccgtgaagaaatggttgattgacaaatatttgtggtatattaagtgaaaaaatagcatgatcccaatgatctctatctactttttgcaagggatttttctaggtatcactaagaatgctgtgagatgtgatgtgctaccttagactatgaagtcaaacagatctgagttcagttgggcagatttcttaggctctccacgcctgacccctgtgtacttaataaatgttggctgttgttatttttatcaccatcactttcatcatcacttctgggagcaaccaaattggttttggcaccagaagatgtcttgggggaccaatcagatagctcctcacttttttattttattttataaatttttaaattaaattaaattaaattttttgagacagtgtcactctgttgcccaggctggagtgcagtggtgcaatcacgtctcactgcagcctccacctcccaggctcaagcgagcttccctccttagcctactgagtagctgggactacaggcgcatgccaccatacccaaataatttttttattttttgtagagacaaggactcaccacgttgtccaggctgttctcaaactcctgggctcaagtgatcctctgcctcggcctcccagagtgctgggattataggcgtgagccactgagccgggccagctcctcactttttgcaggatgagagcctgggcttcctttgatcacgtggagccaattacacctccttggctgttgcgagcttagattcaggagattgtatttccctagcatccaacaggcatgtccaaatgtcatctcttttcttccacttcactttctgtcatgttccctttagcggttgctgtcggggctggtgttctgactgagactgatgaattgttttataatttttccagagtaattgcaatgatagtcatttataggacaggacagtcacgggtcacttaacaactggggtagattctgagaaatgcatcattagacagttttgctgtgtgaacgtcatgcagtgtacttgcacaaacctagatggtgtagcctcgtatacacctaggctatgtggtttagcctattgccccaggctgtaaacctgtacagcatgttactgtactgagtgctgtaggcaatcgtaacacaatggtatttgtatacaggcatatcacagagataaggcagttttggttccagactaacacaataaagctaaaaccacaatagagtgagtcacatgaatttttttgtttcccggtgcatctaaaaattatgtttatactgtagtccattaagtgtgtgatagcgttatgtctaaaaaaaatgtgcacagcttaattttaaaatatttacttgcggaaaaatggtagcaatcatcagagccttcagcaagtcataatccttttgctcgtggagcatcttgccttgatatggatggctgctgactgatcagggtagtggttgctgagttgcagtgactgtgacaatttcttgaaataagatgacaatgaagtctgctgcatcaactaactcttcctttcatgacagatttctctgtagcatgagatgctgttcggtagcattttactcacagaagaacttctttcaaaattggaatcctttcaaaccctgctatcaactaagtttatgtaatattctaaatcctttgttgtcatttcaacaatgttcatagcatcttcaccaggaataaattccatctcaagaaaccactttctttgctcactcattagaaacaactcttcatctgttcaacttttatcatgagattggagcaattcagtcgcatcttcgggttccgcttctaattctagttatcttgctgttttcaccacatctgcagttacttcctccactgaagtcttgaaccccttaaagtcatctatgagggttggaatcagcttcttccaaacccctgttaatgttatattttgacctcctcctatgaatcaccagtgttcttaatggcattttgaatggtgaatcctttctgggaggttttcaatttaccttgcccagatccatcagagaaatcactatctatggcagctataactttacaaaatatatttctttattttattttatttcattttattttattttttaagatggagtctcactctgttgcccaggctgaagtgcagtggtatgatctcagatcactgctgcctccacctcccaggttcaagtgattctcctgcctcagcttcccaagtagtgacaccacaccaggctaatttttgtattttttttttagtaaagtcagggtttcaccatgttggccaggctggtctcgaactcctgacctcaagtgatttgcccgccttggcctcccaaagtgctcagattacaggcatgagccactgtgcccagcttcaaaatatatttcttaaataataagatttgaaagtcgaaataactccttgacccatgggctacagaatggatgttgtgttagcaggcatgaaaacagcattaatttccttttaaatctccatcagagttcttggggaaccaggtacattgtcaatgagaggtaatattttgagagaaaactttttatcctgagcagtaggtcttaatactgggcttaaaatattcagtaaaccatgctgtaaacagatgtgccgtcctccaggctttgttgctccatttgtagagcacaggcagagtagatttggcataattcttaagagctctctgattttcaaaatggtaatccagtgttggcttcaacttaaagtcaccagctacattagcccttaacaagagtcagcctgttctttgaagctttgaagccaggcattgacttctcctctgtaactatgaaagtcctagatgacatcttaatagaaggttgtttcatctacattaaaaatctgttgtttagagtatccaccttcatcattttagctagattttagctagatcttctggataacttgctgcagcttctacatgggcacttgctgcttcaccttgcacttttatattatggagatggcttctgtccttaaaccttatgaaccaacctctgctaacttccaacttttctttttttttttttttttttttgagatggagtctcgctctgttgcccaagctggaatacagtgacacaatctcggcttattgcaacctctgcctcccgggttcaagtgattctcctgcctcaacctcctgagtagctgagattacaggtgcatgccaccatgcccggctaatttttttgtatttttagtagaggtggggtttcaccatgttggtcaggctggtcttgaactcctgacctgatgatccgcccacctcagactcacaaagtgctgggattacaggcgtgagccaccacacccagccccaacttttcttctgcagtttcctcacctctttaagccttcacagaattggagtgttagggtcttgctgtggattagactttggcttaagggaatggtgtggctggtttgatcttctatccagaccactgagactttctgcatattttcaataaggctgttttactttcttattattaatgtgttcactggagtagcactttaaatttccttcaacaacttttcctttgcattcacaacttggctaactgtttggcccaaggggcctgttgtggcctgcaatatgccttcctcactaagcttaatcctttgcagcttttggaatagggatgcccgaggagaaggagagaggcaggagagtggacagtgggtggagaagtcagaacactcacaacatctattgattaatttcactgtcttatataggtgtggttcatggtaccccaaaacaattacaacagtaacatcaaagatcactgatcacagatcaccataacacatataatcatgatgaaaagttttgaaatattgcgagaattaccaaaatgtgacataaagacatgaagtgagcatgtgctgttggaaaaatggcaccaatagacttgctcaatgcagggttgctgcagaccttcgatttgtaaaatgcaatatctgtgaagtacagtaaagcaaatcacaataaaatgaggtatgtctacatctaaatgtatttaaacatagaaaaggtacagtaaaaatacagtatcattatcttagggcatcaacgttgtatatgtggtctgtcatctaccgaaatgtcattatgcagcacatgactttattgaaaatcattgtaatatctttattttggtaaatttttgtaaatcaatgtctcataaatcacatgcccctgttttcaaaaatacgtaatcaaggaagcaagctttcttggtcaagtatgctgaatactcaaccccttggagaggcacgtagtcattaagatgttcaagtctctgagaagttctgttttgaagacacgtatttctatgtttaacacagtttccactcccgcgccgccccccccctccaaattaagtaccagtcagcctcagggagactgaagccagaactctcctgattgacctatctttttgattgtgtagttataggatattccaagataaatgcatgaatactaccttgacggaatgtgatttctcaagtctttccaagtatggtgaccacaccttgagagtcagggctgaatttgcagatgagcattcagactgggtaaacatcaccttctgtcctgtggatgacagtaagccattttgttttccctttttttgtaatgtcatcatcttgccttgtttttttccacattggttggtccatcaacaagaattctttgagggcccacaaatggatggccttgcacaaggagcttaaggaatataataaagagagttgtatccctaaagaattcatgggagagacagaaaaagataggcatatcatcaatgcaacaattaaatataaatctaacaccttcagtgcctcaaggatgtgactatgttggggcccgtgctgttgaggagaagttctggaaggattcttgtggtgaattttctgggagaaagtcagtatggaattatgacttaaacaaagaaacataacgtgataggcaaaagaatgaaggcagatgtagagatggaaaatatgatgcggacagccggcttgcccagagcgaaggacagagggagggatagggctgatggcaggtgggttgggtcagactggttggtcagcatcaaaaattgttcccaggttaggtggagattgcagtgagccgagatcacgccactgcactccagcctgggcaatagagtgagacttggtctcaaaaaaaaaaaaaatattgttcccaggttagatttggagggtcatggtgaccaccagagtcccctaaatatgagatgagcatatttagaatatcaggaattgaaaactaattaaaccatatattagcaattgagagagtaaagaagattagaggttaaaagaacctaattcacaaaattcacatacagcccttcaaaactcacatagagaaaagcactaaaagaattgtctctggctaggcatggtggctcacgtctatgatcccaacactttgggaggctgaggtggtggatcacttgagcccaggaattttctttttttctttctttcttttcctttttttttttttttttttttgagacaaagtctcactctgacacccaggctgaagtgcagtggcgcgatctcagatcactgcaaactgcctccagggttcaaatgattctcgtgcctcagcctcctgagtagctgggacttcaagtgcctgtcactatgcccagctaaatttttttgtatttttagtagagacggggtctcaccatgttggccaggctggtcttgaactcctgaccttaagtgatccacctgcctcagcctcccaaagtgctgggattacagacatgaaccaccacacttgtccttgagcccaggaatttaagaccagcctgggcaacatggtgaaaccctgtctctacaaaaaaacaaaaaaaataccaaaaaaaaaaaaaaaaaaaaattagccaggcatggtggagtgtgcttgtagtcccagctacttgggaggctgaggtgggagagtcatctgagcctgggaagtcaaggctgcagtgagccattatcacaccactgcactccagcagcctgggtgaccagagtgaagtcttatctcaaaaaaagaagtgtctctatatggggagtggtctttatgccggtccctgctctggacccccatgacccctacagttacatcctccctggtagagaatgatgctaggatgcctttcttccctttcccaattccatcccaagcctgggtaaaaacgtcttacttttggaatcataaattatcaaagttagattatattttctaatggtacctttacaaaaacaaaggaaagatgaacagaaaagtaagtttcacaatagttaaaagtacaagtttttgctcctataattgctaactggcttaccaggtcctaacttgtcccaaatcctgttagctcccatccatggaagttccctttagagcctaggtacaacacggttaagcagcttgtcaaaaagtcatacaggtcatgagtggctgagcaaggattcagacccaggctcttgcttctgtgctcttagcaactactacccaatattggagatttgcctcttgaagtctatgtattttagtgataggaaagtgtttccaggcatcatgcataacctatttatacttgctttggcaaagtattccaacaagttttcttgtctggttttcagacgagcactttagaatgatggaagcaggtccattaacagccctgaaaaagtaacagcagccaaagaagaatacaggacataactcaaacaccatgattgcctggaaccatttatgaatcattctatagttattattgagtacatctgtgtaacagctgcattctgagcactgaagctacaacaatgaacgagacaaaatacctcatggagcatatatgtgctaatcaggaatacagataataaataaatagatacatattacatgacaggtagtgactatggttcttaagaagactgaagcaaggcaataggacagaaagtaatgggagctgcacttctacatagaatggtaagatacagtctctctgaggaagtagcatttgagcagagacccatatgaagtgaaggagccagccacatgaatatctagtaaaagagcattcagaagggaaacagctttagacattgttggaaatatatatggttaattatatatgttaaacatgtaaaggtggccactaaaaataatagagatgccatctgtagcttccatcctgaaaaaggaaataaaattcaagccaacaaaaagcaggaataaaagaggagaagacaccaaaaacataaaatagaaatttaaaaagaaatccttatagaaaatacaaaatagcgtagctggaataattccaaatgtatcagaaaccacaataaacataagtggactaaacttcattaagaaagacaaagattatcagattttttaaaagaaactaaatccaactacccttcttagccatgtcaatcaatgtcatgacaatagtatatcaaagcagtgtacttccgtggactaattgttctgcatggttatgaaaaattaatgttgaagtttttaaaatgtgatttttgattgtcattttgcttgttcttctgcttagccattattggaccccctggaatgcaagtagaagtacttgctgattctttacatatgcgtttcttagcccctaaaattgagaatgaatacgaaacttggactatgaagaatgtgtataactcatggacttataatgtgcaatactggaaaaacggtactgatgaaaaggtaaggttggctaattgcatttcagaggtagtaggctttcatattctttgcagaatcttgcaaggtggcagcaccttatggactggtcctctgtaagccaagagcttcccagactgaggggttactggtatctctggctcaagcttcccagactcctaagggatatgtgtagagcagactttcaggacaaagtctgcacagtgacagcagacctttccctccctgaagggcagttgcaggggaaggcacagttgagtcagagttagctaagggaacttggagctggctgaattaggtgatcagcaaattgacaactgtcccatgacatcaacccctgtgtcccacacacaccgcaaatcagggacgtccgtggtcaagacagccccttgttgctctattcttcaggggacaatttctttaaaaacatgggcttggagtcaaaagatctgatcggaatatcacccgtgccaccatgtgccattggtcactttcttgaccccagcctcctcaagtctgcaaaatgggcataataacttactttattaataaaacaaggataataacctacttcgtaagattgttggggaatttaatgaaataatagaaaatataaactcatcccattgcctggaatgatgtatatatggtcagtacatcagtacatgaggtttccttcctctttgctagacatgttaagtttatttttattcatccttggtcaaggtttattctgatacctaatgcttctgagctgaatgccattcatggtcctaaactgacatatatatgttatgtatgtcatattacatatatgttatcccttccacattaaatgttgattttaccacttaattctcaaagtgtttgggaagaagggatcacccatgtttattatcttaggaatgatgtagttaaatttatatacacacactgcatagcccaaaaaatctcaagttaatttttttccccaaaaaatgttccattaaatgatgcagtgtcttagtccattcctgctgccacaacaaaataccacagactaggtaacttataaacactagaaatttatttctcacagttctgcaggctgggaagtccaagatcaaggcaccagcagattcagtgtctggtgagcactggcgtgctctgcctcctagatggtggaaggcaaagggcaaggatgtaaacagctcccttgctgctcttttctaaggtcaccaatggcattcaggaaggctctgccctcattatttaatcacttctgaaaacctccacctctgagtcctatcatagtgacagttaagtttcagcatatgaattctgatactcacaatcactgatcaaatgcaggcatctctgctaagccctggggtataaagataagagcagattgctcccctccgggagctagcaacagacctcaattaaggatctagttttacagtaagcagggtcaggtgcctcctgaggcaagtgtgaatgcaaactccacttactgtttagcttcttttctcacacatgcccacaacatgggcatctggttacacatttgtcctctctcttcggccagttgtgtggcaaccttctgtgtgacttaccgagtgtggaaaggctgcctgctgcactgctactctcacaggtgcctgtgatgccaccaatacaggttttttgggggtttttttgaggcagagtcacagtctgtcgttgcccaggctggaaagcagcggtgcgatctcagcttactgcaacctccgcctcctgggttcaagcaattctcctgcctcagcctcccaagtagctgcgattacaggcacctgccaccacaccctgctaatttttctatcaatacaggcttatatggttcccctctagaatgtagagattcctgaggcggtgccagactaggtccctaaactcacagcatgaagggcttttgagaattctttcttcctgttgggagaaagtgagaagataaaaccagaagttgcccagacgtgaaagggcagaaaaagccccagcagggattgagaaggtccctctactactatgccaccaccttacctgcttgcctctgagtttaatctttgaaaaaatttgcattgtaaggttttagaggcactggacttctggaactgcaagcccgccatttttttcagttgttgctttgatttgcttttggtcttttaatttacttattagaagttaaaccattttcttcatatattccataagtctaatccaattattgacctccatgggcttagctcctcatgcagtaaaggcatataggcatgctgtcaacgaccccaaccccaaaaaagaactaaccaattgcgactgggtgtggtggctcacacctgtaatcccagcactttgagaggccaaggtgggcagatcacctgaggtcaggagttcaagacaagcctggccaacatggcaaaaccccgtctctacaaaaatacaaaaaaaaattagctgagtgtggtagtgtgcacctgtattctcagctactcgggaggctgaggcaggagaattgcttgagcctggcaacggaggttgcagtgagccatgatcgtgccactgcactccagcctggacgacaagagtgaaactccatctcaaaaaaaataataattaaaagaccagtttattttatttatttatttacttttttctttatttctgagacaaagtctcgctctgtcaccgaggctggagtgcagtgtggggtgatcctggctcactgcaacttccacctcccaagttcaagcgattctcgtgcgccaccacgcccggctaattttttgtatatttagtagagatggggttttgccatgttgactaggctggtctcaaactcctcagtcccccaaagtgctgtgattacaggcacgagccaacacacccggcctgctttatcttttttaaaaaagaagtgatggcttgtgtgtcatttaagctggagaattcaggaaccaaaatggtttgtgggcaccactgtcagtccttgatgcaccccctgagtggcctcagggtccctgaactgagaggagcacctgctacctgctccttcctattttaagtctaaaacggctattatcactgataaatgtgaaaaaaaaaaaggtggtgcccttccactgcttagtcatgttcttatttttgtctccattactagtttcaaattactccccagtatgactttgaggtcctcagaaacctggagccatggacaacttattgtgttcaagttcgagggtttcttcctgatcggaacaaagctggggaatggagtgagcctgtctgtgagcaaacaacccatgacggtaagccctgagatgcacctccgctaagcatcctaaacagctttatagacacctgccctagacatgattgcatccaactcaaattccagctcagttcagaaatctatcgccctgacattatctctcagccctgactgctcagcttcatgctaggaaggagaccacacccgcttctgaggcagctcattcactcttagatcaaaggagttgctagaaaccttttctgtctggtggagcgaggtctgcctccatgagccccccttggcagtacttattctaccatcccaggctccctaaagcaaggctcatcagtcctcccaagaccaccagcagagctcaagccctgtcacataccccaaaggtctttcctccccaggcggcacatctccagccactgccgacatgtgatgggaagcaagtgtcaggaaatctgaccacggtcctcagccagtgctgcctgattcagggccccttatatgcaggaatccaggatgtcaacacagtccttcacacaccatatggaccacttctagcttggaggaaggaacgggagaaggaaagagagaaggttcccatgggcctaaacactgcatatttatgtgcagacacattgcagttgcatgttggtgaaaactgaggcccaggtgtctgcatacaaacagcaggccttcctataatttaaagatgttggtgaagggttcagcaagctcagacaatggaaggatgaaacatggcatgcggcatgcagtttgatcaaaaagaaaaacatgtctgccggacgtggtggctcacgcctgtaatcccaacactttgagaggccgaggcgggcggatcacctgaggtcaggagtttgagaccagcctggccaaaatggcaaaaccctgtctctaccaaaaatgcaaaatttagccaggtgtggtggcgcacacctgtaatcccagctacttgggaggctgaggtgggagaatcgtttgaacccaggaggcagaggctgcagtgagctgaggtcatgccactgcactccagcctaagcaataagagtgagaccctgcctcaaaaaaaaaaaaaaaagaaaagaaaacatttcaaatagcttgcaaataccagtaatcacccatgaactgacaaaatccaaacattttacaaaacaaaagggtatgagccattgaaaacctgctttcatcaaacaccattttcattttttcttaaaacacacctatcccatttaaatcccacaagttttcaatgagagcattagaaggatcttctcccattttacaaactagaacatgaaggttcagagagtgatgcactttggatgttgccctcatccagatctcacgctgaaatgtaatccccagtgctggaggtggcgcctggtgggaggtgacgggatcatgggggcccatttctcatgaatggcttatcaccatccccttggtgctgtcctcccgagagtgagtgacttcctgagagacctggcggtttaaaagtatgtggcatcttgctctctcttgcccccacttagctttccaccatgattgggagcttctagaggcttccccagaaacagataccgctatgcttcctgtacagcctgcagattcatgagctaattcatcctcttttctttataaattacccagttttagttatttgtttatttgttttttggatggagtctcactctgttgcctaggctggagtgcagtggctcgatcttggcacaacctccgcctcctgggttcaagcaattctactgcctcagcctcctgaatagctgggattacagtgcccaccaccacacccagctaatttttttatttttagtagagagtggggtttcgccatattggccaggctggtctcgaactcctgacctcaagtgatccacccacctcagcctcccaaagtgctggggttacaggtatgagccaccatgcccagccatccagttttagttatttctttatagcagtgcaaaaacagcctaaaacagagaggttaagtaacttgcccaaatgctagtaaatgaaaaggatcaaccagaacacaggctcattcatctaagcccaggttatgtttcctgtaacttactacctatagattaattccataggtaaactgaggcaccgtgtccttgtggataaaacaggaaagagtagtctgcctcatggtgtggtcagatgaatctgaaacaagttagagaactttacacggaggatgtagattagtagattctcccacagttcacaacctatgcagagcagggtcctctctcctgccccctgtggaactctccatctggggtgagtaacaaaagcattccttgaatcatgtcaccatcacccagatgtgtccttgtttaagatgctaagatgccccagtttgagacaccaggagacccaagcactgccccagaggttcattacccaaaataaaataacagggcggggcccatggatccctgtttgaatgagtctccgggcgccaaattagagaactaccgaaatattaatggaaggatggatggatgagtaggagcctggaactttctcaagacctgggatgtcaaatcccaaggagacctcacgtgtccagctgtggtgtggactgggggccgctccagccagctcactgccgtatgaccctggaatcaccaagagcagactcacatgtttgagctgaacatgctggaagtgtgggccagacggcaccgcttctgggctccggtgcatgaaacaaacaagaaccaagaactgggataaggagtgctgaaacccgcaaggacaggagctggggagatgggaggccgcctgcgggaatgaaagcacaagagaacgagggccatggggttgggggcggcacaagtgctcaggtccttccagccgcttccctcatacagatgccacttccatccctcagacgtttaaggagtgtgcactgtgagccacgcactgtgacaagcaccatgtcgtgccagcaggtgactgcacttgctgtagctccagggtcatgtgctgtgtcagggctctttgatccctgtgtccctttaaaacgacatgatcttcatgggcagtgtttgttctcttggcccctctcagagccaaatgctgtgctcgtgagggcggtgctggttggcaggggatgggcacagagaaatcaggtggccagggcagctggaggagggacctggagccgaacaaggggagctgggaccacgagcaacccaggtgacatcctggactctgtcaaagataagcaaagcaggacgctaattaaagcagtcaaaacattttattcagtaatgactggagttgggaaaagggccgagttccatttactcagaggtgttttaaagggagaacgagggccggggcaggaggatcgcttgaacccaggagttcgagaccagcctggccaaaatagtgggaccccccatctctataaaatattttaaaaattagctgggcatggtgacacatgcctgtcgtcccagctacccaggaggctgaggtgggaggatcacttgagtcctggaagtcaaggctgcagtgagctgtgtttgcactactgtactccagcctggacaacagaacaagactctatctcaaaaatgaaaataaataaaaggagaatgagggagtagaaagaaagaatgcgtggggagttgagcagaatcagggaagtgaaaaaaattttaaatcagctaaggggatgggtcagtgccgtgaggccctctgtgtctgtgaaccggtgtttatcaaggctaggcttctaccctcccacagagacagggagacagaggccctgtacttcctgatgatttcaaaagaatggctcgcagatcgttgagaaaaatatccctgcgttgtgggagatacatacatgtctcaaagggacacaggaaggattcaccactataagccctttttaataaatgctctccgaaagagaggtcaaggcctcgcatcaggggctgggaagaacaaatggtaagttccttaggcagccttgggtttttccagacaggaattcaagggtgtggccttggcctgctagaagctatgctggggtttggccaagtctcttagtgcaggggtttgtttgtttgttttggctttggttttggtttttgaggcggggtttcactctgtcgcccagtttggagtgcagtggtacaatcatagctcactatcacagcctcgacctcccaggctcaagcgaccctcccacctcagcctttcaaattgctgggactacaggtgtctgccatcatacccagctaatttttaaaaaattttttttgttgtagagaaggggtctcactatgttgcccagactggtctcaaactcctgggctcaagtgatcctcccacctcggcctcccaaagtgctggggttacaggtgtgagccaccacacctggcttagtgcaggggtttggatagagttgttcatgcagagtttctgtttttctcaatatagaacgagatggtgcctgtgtttaactcaggctcaggtgtccaggggagtatcacttgctgtgtcaaggcagaagtggtatatccagacctgggaggcccattgctacactgccagtagtaggtacagtggatcagaattcttgcttgttattcttttgatgtatgtcagcaataattccagaaaccaaactttggagaagataggaaaagggtgaaactcttcaaaaacctctgggtcctccaaccagttgctgtttctgagacgtcccccaagataaacgtacaggctctgttttcagggattgtgatggttaaaatgctcttgggatcactgtgacccgacctgtgacaagaatgtaacatgcccattacccctggcagaaacggtcccctcctggatggtggccgtcatcctcatggcctcggtcttcatggtctgcctggcactcctcggctgcttcgccttgctgtggtgcgtttacaagaagacaaagtacgccttctcccctaggaattctcttccacagcacctgaaagaggtaggtaggatggagtgagatgtggatttgaaaaccttgatcggaaagagctttcctttctagttagggctgcccaattccagacaacatgttttccaggaaaacacacacgcgcgcgcgcacacacacacacacacacacacagacacgcctcttgtgtgctggtccattctcttgtaaccatgtcagggaagtctgaggtgaaggaacagccccgaggaaaggggcgcggggttgtccagtatccctctctgcacctagggcatcgctccttctccagccttcactgcccaaagccccaggtccctgaggagcaaaggtgatggttctagggcaggaggggaaaaacagagctcagtgtggaagaaagagaaaactggaggctaaatgccaggaaatcaccagagggagagaatgggaggaaagaaaggaacatttccagttttggaatatacgagagcgattgaaattctgggtagtgtttcctggactttaggaaggctatttgtaaaagggttaggaagaagaaacaatgcacctgactaatgataacaggactgaagaagccctaagaaatgaaactctggatagtcactgacactagagaatgaaaagattccaagcccggacccaaaggaactatctttggtctcatttcccaggaagcagactctaagatagagatttgtattcaaaaggcttgatggggaacatccttgggaataataccctaaaggagtgaaggtagccagatgtggcagagagaggttgagctgtcacacagccacaacagaggcctcagccaatcccatgtggcctctcgagctggggtggccctttagagatgtcctaagctgaggcaagagggatgggcgtgtgaactccacattggccatgcgctggatgtgggctactcccaggaaggggccctaagctagggtgagaggtgagacagcagcagccaggagctaggagcacgagtgcctcattcctgaaggcaccacagcctccattacagtcacccctgggaccacttggatctactggaagcagctcctccaggatctgagttgatctcgtttcctggggagggttacaggaggaagatgagtggaatgcactccagcccccaccgctgctgctggtgtcgggaccacaaaggaatgcttgtgggctggctccttcctccgctggccctgagggcccgctctcctctcccgggaggagcctgtgctgtaggggctgctgacctgattgggtgacccagccctcatcccagaaagcactgagcctccggtccccaagcccatctcaggcaatggcctgtccctgcacttgtcaatttgctgtcaaaatcgggcaggggagtcccaggaggtgcccagtgactctggcgggtacccactgtgatacagtggtgacttctctcttgcctgccagtctcttggcctgaggaggtggcttaaagtttatcgggccttgtttcatgtcccctggtagaaatgctcccactctgggaaccttctagaccaggtgtcagcaaactttttcttaaagggccaggtaaaaaatattttagaaggccaggcacagtggcttatgcctgtaagcctagcactttgggaggctgaagtgggtggatcacctaaggtcaggagatcgagaccatcctggctaacatggtgaaaccccgtctctactaaaaatacaaaaaattagccaggcgtggtggcgggcgcctgtagtcccagctcctcgggaggctgaggcaggagaatggcgtgaacccgggaggcggagctggcagtgagccaagatcgcgccactgcactctaacctgggcaacagagcgagactccgtctcaaaaaaaaaaaatacaaaaatacaaaaattaacccggcatgctggcgcatgcctgtaatcccagctactcgggagactgaggcaggagaatcgcttgaactcgggaggtggaagttgcagtgatccctcacaccactgcactccaccctgagcaacagagcgagactccatctcaaaatttaaaaaattttaaaatttatatatatatatttgaggttctgttggcaagaaataaaaatcaaaattatgtagtcacttatataaccacttaaatataatcatttaaaaatccgaaagccatgtgaaaaaacaagtggtaggccggatctgccccgtgggcctttgtttgctggccctgccctagacccacagagcctcaaatcacaaggccagggagcagcggtttccccagtaggtcactgggcatgatgagggtgaacagggccactcctgccctgcgcttgcttcctgacgcaggtgttccacctgctggggacacagccccacatgattgttggtcttgggtgcatgccaggggctggaggacaatgccttgccctcaccaggtgtcatctccaagctggcgcctcccctgcactttcaacaggccgctccgtccttcttccagtctggcagctgctgggtggtgcagggtgggatacgaccaggggggtcccgccttcactgtcagtgggcccattggtctggcaccatgtgatacggcgtctctactagtttgtcggggctgctgtagcaaagtagcactcgttgcgcagctgtaacaacgggaattgattctctcacggttctcgaggccagacgtccaaaatcaaggtgtcactaggatggtttccttggaggctgtgagggaggatctgtcccaggcctctaccctaacttctgagggttgctggcgatctttggcgttccttggcttctagaggcatcacccagtctctgccttgatcttcacaagccttctccctatgtgagtgtctgtgtccacattgcccctcctttatacagacaccagtcacgggaggagggctcaccctgctccactataccctcattctaacttaactgatcccctctgcagcaaccctatctccaaatacagtcacattctgaggtagagggattaggacatatgaatttcttttttttttggagacggagtctcactctgtcacccaggctggagtggagtggcatgatttcggctcagtgcaagctccgcctcctgggttcaagtgattctcctgcctcagcctcccaagtagctgggattacaggtgccctccaccacgcccggctaatttttgtgtttttagtagagacagggtttccccatgttggccaggctggtctcaaactcctgacctcaagtgatctgcccgccctggcctcccaaagtgctgggattacaggcgtgagccacagcgcctggcccagaacatgaattttgtaggaacagaattcaacacctaacaggatcctctaccaggagagaaaacacctgtgagaccttgggaatcctgacaggccctgcaggacacgaacagcaaatcactcctaaactaaaggttagctccagccaggatgcaccactgccccttccagagtggtgcaagagtcgacgtcatcagcttgctaccaggtggctggtcagtctcctcggggaatgccgtcatatcaggggctcagcattgatctctgtcgcaggcaggttggacattccacagcagtggtggctacccagccgtgggagtgggagccccttctttcaggcccacgcgcagcctccatccctgccaccacggctgctgtgttcatgagccctgtgccatgtacaggtgaccagtggcagaggctggctgacatccactggctgtgtcatcatgtctccctggctgtctgctgtctatgatacatgctctcagtgggagttaatatgggatgcagaaatctccacgctccagctactccctcaggtccatccttcttcccaaacgtccttgtccctaaccttccagtcttccttccccagggcccctgaccaccaggcttgtcactaacccctgcctgggatcccacagctggcctgatcttgggctgcttttctttccacataaaggtgatgatcagacccacggcccaaagctctgcccgtggggacactttctccctggttggggctgaagtgcagcagcgggccactttcggtgtgtgcccacataccatgctaaccttgccatgaaaccaggccggcctttcctcctacttctgctaggcataattacccatccccctttatggtcatcatgtgagcagacacagacacggtgcgacaggggtagaggggacaggagtccgagccacctgcatgtggccaacatgcaccctctgaccccatctcaggacctactgggtctcaggcctcatgatggtcacttctgggcagcaccatcacctcgcgtccctcgtcagaagctctgtctctgccgggaccccatagcgtcccaggagctgctttttcaaacagagtacaattatctgctgcagatggccccgcctgaccccagaactctcgtatctatgttgtgactttcctcttgggatttgccataaactccacccagcatcttttcccaccccagacacttcaaggatatgcgaagtcacacattccccaggttggattcacaggccgtccctggtgggtaatgtaccagtcctgaggtgtgcatagggctgcaggctgcacggcccataccttctgcagggccctttcctgcctggggcccctccgtgccagcagcctcctgtgtggtttgataaacatattggaacagtcagtattcctaggcgtggaacatgctgcctccagaaccctgaggcctccacagcacaatgcttccttcctagtggtgggaggggcaagatacaataattggtcctttaaagaggatgtcctggcatgccccactgcaagggtcccctcaaatatcacagatgtggcaggtccctgaatctctacagggtgagtttctcaccctctgcagtgtgtgtgcctcaccaatgccttgccacttcttggcgtgtctggtcctattaatgtattgttgtgatagctaatatcaggcccttgtccccgcaccaccagtcagctgatgcaggctgcctctggcaagggcacagagccttgaccgaggcaactgccttctgggaagggcacagcctagaaagggactcagctgtgagccatttcagcctccgatattcctggaggctgggggaacaagcgcctcctccacaaaagggatctgggcaacatagcactgcatctaccctcgatggcaagtggggcacaggaccataggcaagtgtttcagagcgactagaaccccctacagagagtgccaggccgagcatggtggctcacacctataatcccagcactttgggaagccaaggctggcagatcacttgaggtctgaagttcgagaccagcctggccaacatggtgaaaccctgtctctactaaaaatacaaaaattagccacgcctgtaatcccagctactcaggaggctgaggcacaagaatctcttgaacccgggaggctgaggttgcagtgagcagagatcgcgccaccgcactccagcctgggcgacagagtgagactcgatctcaaaaaaaaaaaaaaagtaccaaggagactgcagcaccagcatgaactaagaatcctctatgagcttttgagaagccacagctgcagcaggaagaacaaagaatgagggtgggccctttgcttgggtaaaaggtgttgtgttaactgagaaccaaaaggaaacaaaattattcacctgctatttttgcttctggcttcaccatcagagaaactggtcagacaggaaagaacagacggaatgaacggtagaggggcctgctggcatgagctctcacctccgaggctagaagactttgcagacttgaccgtggagccagcccctgtaagatctgagaaatcagagatgggagtggagggtgctggagaagggccaggcaactacggagcagttcgaggtcctcacatcacgactttctccagcttgactcataatgatagaatccattaaccaggatccagaggatcatttcgagttcagggagatttgctaggaatggagactttgagttaaaaaagcactagggaggttcatcctacactgatctattgagccagccaccagtttgtgtgtgtgtgtgtgtgtgcgtgtgtgtgtgtgtgtgtccaaccgggagactcagctgatactgcttccttgagatttaatacaccttcctttgatctctcctgtccccattatcccaggaaaatccagagtagcttccagtccattctcattaatccactggatccaaagtttagagaggttccccttccctccagcctccttcctggcccaacagaggagcaccccaccaccctccatcagctgctcaaaacccacaagggaaaaatccctacaggtccatgccaggaggtagtggagctaccctcaggttccattaagtcataccagaaggctgagtgtagaaatgacattaagaggggttccatctgtagggaaagggttcaagatgcaaagctttacagaaggttctccgtctaattgtgaagattaagagcactggtggacctaggaagatgaagaatggagagtgggaaaccagcagagatttcaggaaatgtataggggcatcttcatcgttcaaagcaccggagagacaaagattattagactgtggtccctgcccttaaggagccctggctacaggtgacacaaactgagaagagttggtgtctattaaaagtgaga

SEQ ID NO: 317 - DNA, 31737 bp, Homo sapiens
aagcttagccagcttaactgcaggtctgcacaataacaaacccttcagaatttcagcactcatttcttcatcaagggccccaaaattatggttgtgtatcacctactcatttcctcttggttcaacctcacatgctttcatactactgctgaccatctgtacatgttactcacccctttcctcctttcctctattcaaataagccaggctgggttcgcactccagaggtacccctattgatggttgggcaaataggatacagtttccagaaagagtgacaactttgcttcctggaatccctgcacaaaatgcagggtcacatatggccctgaggagggatttggtggcaaagagatatctaactttagtagtttgaaagtactatggctagctgtggttccaaactctctaccaggtcaccctggggtagcatagtaaattcacaggactgttgggaggtattttaaattttccaagggaaagacaggatcctccatatctgttgaacactgcacaaactcagggttgttcatggtttcaacattagattacgtcatattcctttcagtgatggcatcttttggggaagccatgtttttggcagttactgtgacaaaaagcaagtgccacaaggaaatcagtgtggaacaggaaatgaaggtggcagtgtccactctgattccaaagtttaaggagttgcacagtgcccagcaggccacacatcccatgagtaagtaattgtgatgatttcagaatacaaaaaaatattttttttgtttcaatgtatcattttttttcaaatggccaatacaaagtttttagcacataaagacttttaagcgatttgaccctaactagttaatcaatgaatctatttggtatttcttttggcctacagatgccatgaaaaaattactgaagcactaagcgttctgcgaccaaggaagatttggaaacttctggtctggtcaagtcagccatgtttcacagctcccaagaacttcattggtacctgatcctatgacaaagcatacctgggtcttggttttggttatcgtggttgtttcatctcagagacttttacatattttcagtgctaaatgtgcctactacatggggcctgtgcagccatgtgcctcggccagcacctgcctcagactccctgggcatctctccctttcctctgcgcttaagtcacaccaacctcctttccattcctccaacccgccaagccctctcccattgtaggggcttcttactgattctcatcctggttcacctgtaggtcccaacttaaatgccacctcatcagagagccctcccctgtgattctctgtctcaccacccattcatttccttcatagcattttgtcctctgcacatatctatttagctctatgaggacagagtccaggtctgatctgcttactacattcacagaatttagctgggtgcctgatatgtaattgtcactcaataaataaccgcaaggttaacaagtgtcagtttaaatcatacacacattttaactggggccctgtgcagcccaaagcatttcagaaggcttttctggcaaacagcccatcagatagacacgtgggacaattgcatcactagccacaggcagagacagtcaagggcggtgtttgcgatcaagaatcccagctctgccacctccttgctggcagacattgggcaagttactcattctgcctctaccagccatgtctttgcttggaaaagggttgttaaaaggactaactataaagctcttaagtaaaatctgtcaagaaacaagcactctaaataaaagtaagctgcttttattaggacaaggacagtgttcaaggactatcccatgaatgcccacacaccattctgagaggaagtttctgcctcagaaactgacaggtccaatgcttcttgcttgttttagaataaaaggctcaattcaaaaaatgatatatggacaattaattcttagccccattggtgtcccccacacaactcatgattaaaaccaaaaagaatctgttatggaactttgattatccagctggacaacagaaatggagaatgttaggcagtgactgtcaatttgtctagactcaaactgctctatggcaccaagcacatggtggaatgtgtgtgcctaatccttccagtcctttgcttgtccccttctaaccagctctcttcatgttctaggcttaaaagtaagcccagtgcaccatgatgttgttccggttgtacctggggagttccaggggccaagggctgctcacagtcacagagaggaaatgacacatggctcctcttcttgcagtgggaagaagcatgagtaccagccttcatctgtccacaccttagttactgttgctctctttcctgggtctccttcgcccagcctctcccctacctgatcctcatgtctggatgcctcattttcacaaccccctggaatcacatcactctcctccccaagcgctatctacacttcctatttcatgcatacccacatcttagaaaaccatttctcccactggcttcctatagatggcctagctaagggtaatgtcttttctgctaacctgatttgctgtcactttataaattttatataggatggtcttacaagacagatggtactgatggactcaaacacgtgatgtgtttcaatcccagattctccatctactagctacatttttcatggaaagttagctttacatctctaagcctcagtctcctcaccagtaaagtgggcagaataatttccacctcatagctttgttgtgagtacgagatgagaaaactcacatgaaacacacaccacagtaactggtccacaggaagcacacccaaaaagtctactactgtggttgctgaggtcaaccccccatttggtagatctcagcttagacatcatctattctggaaaaccttccctcaccgccaccccgaagatgtgtgtgcatctaaagcacccttgctgtgattgtcattgcaaggcgtgtcacactgccatgtcattgcctcttagcttttttttcttttgccccctagaatactgtgagcacattactggtgggggcagtgttccttctactggggcagagcacctagcacaaagtacgtgctcaggacatattctatcatattaaaaatagctatttaggccgggcacggtggctcacgcctgtaatcccagcactttgggaggccgaggcgggcggatcataaggtcaggagatcgagaccatcctggctaacatggtgaaaccccgtctctattaaaaatacaaaaaaattagccgggcgtgatggcgggcacctgtagtcccagctacttgggaggctgaggcaggagaatggtgtgaacccgggaggcggagcttgcagtgagccaagatcgagccactgcactccagcctgggctacacagagagactccgtctcaaaaaaaaaaaatctacttaaacaagcaatctaataaagatgaaattttgctgtgttatacacttattattgctacattggaagactagactcccttggcaaccaaacacattcttttttatattatttaattttaataagagttaccatatattgatccatcttctatgccaaatgtaacttaatccttctatcagttctctgaggtagatattatcagtagtcccatcttataaggaaaatgaggctcagagaattgaggtactttgcccaagatcattcagctagtagaacagagctgggacccaaacccaagaccattcatctccagtgtctgtttgctttgctgcctccaataagactgaggatgccactttcctttttgttaaattttctggcctcccaaataccgtagagtggcatttcattattattggcacctacataacaaacatggtaatgcctttgatgtaaattcctttggtgactaatcaaccccaccttgccatatttttgtctttggcactatttaactttcatgcttcgtcaagtctccttaactggagtgtaactggctggtgacagtgccaaggtcttaagattctttctgtctccccaggtctaaaaggaacatctctcacctactaaaacacataaatgaaattgggtttctgtctatttggctgttccatgttcaagtaaaatgactagaagatcatcaccaagtctgaagggtatttgggacagcttgatttggatctgtggtatacacagctttcacactgggggaccagggaggcacctcaagaagatagacacacttagtaacctttgtactatttgactttttttttttttttttttttttttttgagacagagtctctctctgtgacccaggctggagtgcaatggtccaatcacagctcactgtaacctcagccatctgggctcaagtgatactcctgcctcagcctcctaagcagctgggaccacaggcatgtgccaccacacctggctaattttttaaatttttttgtagaggtggactttcgccatgttgcccaggctgatctcaaactcctggcctcaaacaatcctccctcctcagcctcccaaagctctgggattacaggtgtgagccaccatgcccagcatagtttattttaaactagaggcatgagttacttttttaaagtaccatcaagaataaagatagatagatagatagatagatagatagatagatagatagatagatagacagatagacagataaattttcaaagccaaaaattagagagaaaatgacagggcagaagaccaggggtcatagttattttccagagcagatttccagaacaagatacaataaaagcctgatgaatattaatataaattttctgtgaatggagaaacaaatgcgccttaaatgtgagtcccaaatcaactgtcacaaaggaagatgctccaaattgcaggccccgatttttggtcaatctatttctctccaggagaattctatgtgctctagggtgagtagcagcagtaatgtactttattggatggtgctttaacaattcatcctataaatgcaggggatgctggttaatattcaataattgttggttggaggtgatgttgataggggaccctcagacaatagatgccaggacttcaccacaaacatctgcccactccatgttgttcccaccttgtcttgttctatctgtctctactaacagcaagaccagaccaactgttctcatacctttctagcataagcatttctacatctcagcaatcctacaacctaggacacacccacttccttccagttgcccacacacccatttctttcactgggattaccaaagagttgaatttagaaaggaaaaaaaaaaaaaaggtttccatatgcaaatggcaaaatcaaggtcaaggtggaacacttgctctgcagtcagtccagttgagcaggccaaaaatgcccactgggataatgaaattcagtagtgactgcatctaccaccctctgcccttatcatgggccaagggtggaaggacgatattgaaaacatgtgatcacagtcatctttgaaggggaagaaattaatgaggacattgtaggccctttgaaagtgaagctgattctaaccacccagcgggttctccttgaaccactgctcagacagagctgaattatccagacaggggagttgcaacagagaaaaagtttaattcatgcagagctggctgtacaggaggctggagttttattatcactcaaatcagtctcactgaaggctcagaggttagtggtttttcaaagatagcttggtgagtagggagccagggagtaaggaatgctggttggttgggttggagatgaaatcatagggagtggaaactgtcttcttgtgttgagtcagttcctgggtggggcccatccggttgtcagaaatgcaaaaacctgaaaagacatctccaaaggccagtcttagattctaaaatagtgatgttatctgctggagtaattggggaagttgcaaatctttattcctcctaagtaatggctggctaggcatacttcctaacagaattcaggcccctctcatcctcctaacttggtggcctttcattagttttacaagggcaatttagtatctgggaagggccattataatttaactaaatttctcccaaagttagcttggcccacacccaggaatgagcaaagatacccagaagcaagatggggacagttagggcagatccctttcactgtcataattttctcactgttataatttttgcaaaggcaatttccactctaggaatcttttgcaaagcattaaaacaaaacaaaacatgcattagaaaggccactgaaaaactgaatgagctaactcaagcagttttctgcctccaggaaataccacacctaaaacagatgcttcctcatcaccatccataaaagtacaacatttcagcagtgacctggtgaaatgcatccatcccaggagaaggttctcagctatgagcacatgtaattatatttgaaatatggactatggtctaactaggtctgtcagattataaaacacacattcttgatgcactatatattctgccttttgtgtgtgcttcacttatctcttcttcggtaacttttttctttttttctgattagaaaagtaatacaaggtcattgtagacattctggaaaatttaagagatcattaaaaagaaaacaaaaataattcgccctcataccactcatatatacactgttaaattttgtgctctagaaccttctgttaccactagggaatgtatctaagtcacgtggcaccaaaatcacgtggcaccaaagtatgttagtggtggtgaactaacctcagttcttgcctcctcatgaaacatgaggttttccttgaccccttcagagtcctcctgacaggaatgcctcacttactcagtccacagctctcaacccctcatgggcgggggggcagcacacaggtgagcaggtgcaagagccagagcaaatgcttttgggcaccggcaggaccaaaactctgtgcaggccccacagcagcatctagggtggagtacccatgacccctgcagccccacaggacatatgttacagtgcacttttttagctttgctatccatggttggattaagtgtttaacaactcagtgaaccctctgcctttttgcaagggcagagggtcagtgtgacagcctttagcatcctcacccatggcacctgagatctcgtttggtgtccaggaaaaatcaggttgcatgaacgaattgaagggcggtgaatgtggaggattttattgccagtggaagtggctctccacaggaaggggaggtggaaaggggagggaccgggaaggtattcttcccctgaagtcctgctgtcaagtcatccctctgaagtcaaactgcttctctccagcattcagctgcttcttctctcctccccttctctgctctctgccagtggagcctggggtttttatgggtgcagaatgtgggggcagggtgggccatgggtggtttgggaaacggcaacattggagtgggaaaacaggactacatgttctcactttgggccacagcaccaggcttgagggtgggtctttgccaaaaacccccactcttttctgcctagaatttctctgtctcctgtccctattactcagaagaaagaatttgaccaaagggcttaagacagagtgagagacccaggcaagttttagagcaggagggaaagtttatttaaaaagttttagagcaggaggccagacacagtggctcatgcctgtaatcccagcactttgggaggccgaggcgggtgaatcacttgaggtcaggagttcgagaacatcctggccaacctggtgagaccccatctctactaaaaatacaaaaattagccgggcgtggtagctgtaatctcagctactcaggaggctgaggcacgagaatggcttgaacccaggaggtggaggttgcagtgagccgagattgcgccactgcactccagcctgggagacagagcacgattccatctcaaaaaaaaagttaaaaaaaaagagaaagttttagagcaggaacaaaaggaagtacacttggaagagggagggtgacttgagagattcaagtgtatggtttaacctttgatttggggttgcatatgctggcatgcttctggggggttgcctcccttctcccctgattcttctcttggggtggcctgccagcacttgggaggggccacatacacagtatgtttactgaaattgtacgcatgttcacttgaggcattcttcccttactagttgagtgttcttagaagaagctcatacaccagttaaattcgaccattttccctcctagtgctcatgcttaagcccattcgcccagctcctaagatcttatccggaagctgctaatcaccagcttcaggtgttctatctattgggagactgcctttccctggtaccagctgtgaccaattattattttagagaaacagtttaataaccatctgaccctcacctgatggttgcctgacattcctagtggtggtgggcggggagtggcgggggaaccctcttctgccctgctcatgtctgactagctatctgccgtgacacttccactcttcttttggtaagagcatgtatgtatgaggcaggaggtagaagctacttcccatactcctaggctagaagtatcccttcaaaagcaactgaccatttgggggaagaagccttagttttcattatccacacaattgccctatttctgcacttcactggccgcacaaatcacttggactcatgtaacagacacatgtgactgtatccataataggttcattgcccattgcacacagcaagtcaatacgccgagaggccaggttgcagcagagaaagaggtttaatcgtagggtcaccaaatgaggagacaggaagaaaccttaaatctatctccttgtggcatttggggctagggtttttaagagtttgggagtgggctgatgtgttggagatggttgactggttgaagagtgcatggtgaagtcatgggacagggtgaagctgtattttcaacctgatcccctttctttgtgggggttttcaaactgaaatatggtagaattggggacctgaaaaacaacttaagtgattcttaaacaaaagcgttctgattgtaatgtcagagatcccatctaaaggaacaatagggatacaaatcaattcctacacaatcttatgaccctaatgtcagaaatcctatctacaggaataatgcagatgcaaatggtcaggatctagtgctacgtgactttgagcaacaaggaagtgggccaacgtgcaacctaatcaatgcttaattataactatattcctgtccagaacccagcatgcaattcttgtcaaccctgtgagggtggtttcatgactctcaatggcctaccactttccatctagtagggcaaacctgccttgtctatcactttccttgtaataagcccattctccttgtcagggagtggtatacaggtgataagtgagacttcatgaaaaggctatggagcttgtagggcaaattatttgctcctaagagacatcaacaggacaagatagtcttttcttatcccaggtgttatcagtccttagtggattgatgcctggaactgcagagctccttagaaaactaagcccagggcaacctaattgatgcagacgtgaaatctgttcaagtgacctctagcaagtcactgcaagtgactgaatacaaaatagactgttgcaagaaaagagcaacttgcagaacaatatgtatagtatgattccatttatatagccagatagatataaatacatagagaagcattcagaagctctgcaggaatgctggcactggtaacctctggaagccacaggaatcagggcctcaacattgtattctatgtatatttgtattgtttgaagtttttacaatagcatgcatgcatgtattgcttatgtaattttctaagattttaatttttataagtacacatggcttctcctttatttgaaatgtgtactagatgatcaaagcattcttctaggagaaaataagtttttgtggccaaaaaaattctttaagttatttttggtttttagggggttgcctccatgtcacagcttaatcatcagacacattaaccttgcagctcagcacgccctctgtttgtcagcagaccttcctcgcccatagggtaagcaatagaaagcttataggtatcagtttattttgcctgggatcagggtctggattgtgaagtgggacatgttgataaacctcttctccaaaattaggtcaatgggcatttggctcatattaccagaatgctggctggccatgtacagcctgtctccgagagaggctctaatgtggcccccacattagaacaacctgccaatgaccacattagaacctccattgttaaaatgcaggttcctgagccccatcccagatctgaatcacaatctccaagcatcagccccaagaacctgaattttgttgttacatgcagataaagtacgagaaccacttcctccatgggtgaactgaacttaccaaaatagtcagtcccgaggggcagagatggcgtaggtgccagttcttctttctcatcctagatgctcagagtcaaattcttggctcagcaatagacaagtgatttcactgtgggaagacaattcagagccctgttccaggctcctcacattgattctctctgtcttcttccactcctctttgtcatctttgatgtccccttgtgagctacgaaaagactttctgggacacgacaggataaaaaaataaataagtgcaagcagccattcattaaacgtttagccaggatgctgctttaactgcatcccatcatatctcattaatcttcacaccagtcctgagatcaggtactattattaacccgattttacagatgtgaggaactgaggcttaacgaaggtaagtaacttgcaggtgcgggtatccagctctctaactccagagcccatgctcttaaaaccctattacttgtccctggtggaggtgaacactgggggccctttcatataggactagccctcgggctgcaatctgagcggaaaagggaggatgagggcatacttcgaagcttcttttgcataactggcgctggatttttactgagactttacgttacagttttttttttttaattttcaaggtgcttttacgaacacatgaataaaatatttgtgtcattttgaaccttacttgtcttattttatgcatgtatttatttatgggggggcacaaggactcatctgtggtggtgcagccactgtaaataaattagtgaaactacttcacgtcaatttctgttcagtacactttagtgatggatcggaggaaattaatacatgtttacaaaaagcccctcccccagttgttacatatgcctcagagataccagttgtgaaaagtgcaggtgcacttacacacatacgcacacacaccccacaaatggtatcatacgaaaaaacatacctgcaatctgctttgtccacttaattgtatatcttggatacagaacttgtttcactggaaggctaaaaggcaaagtctggggaggcctagaggacacaggggatgggaggaggcgctctgagctggatgtaaggtctccacccacggccagagcacaaggtcggataaccagtgggcctgccggcttggctgcctgggccctcccctgccgagacaaacggctggagggaggaagtgtgcggctgggaagctccgctgctctggcccgggtttcccatttcccccttcccgcgctgagacggcgaggaaagttagcccggaaatctgcgcccgcctaaaacccggcctggtcccagccaccgccccaggaacttcccccaccgcaggggcggaggtcgagagcagggatggagaagtggacctgcgcgggtggactccggggcgcgggtggactccggggcgcggggggactccgaggagcgggtggactgtggggcgcgggtaccgtctcgcagcgacctctgtcggcggctctggggatggcccgcatctgtctgcgtgtacctggtatacgtgcaggtacatgttcctgttcacgtgcagactgggcgggggatgggggggtccacaccggtgtacacctttgcatacctcttagcaacttgaaattccaccacgagagatatctttattccgctattcctgtgcatctgcacggagcccctagggccatagatttgtgtgcaaatgaaatgaggatgtagtctgggtgcccaagggggggtgccttgagtgtggttgtctgtatgcctccctgagggtatttcactttctgctcccatccgcccctatgagcgagtacctatgagcacaggatgtgcacatatttgagtcttattagtggtacacgcagttttatcatctccccaggtctgtgtctgtatgaaatgtgcatgggtgtgtgtgtgcacgcgtgtgttcccactcggggaatgtggggagaggtgcatggagccaagatgggtggtaaatagtatgtttctgaaattaaaggactaatgtggaggaaggcgccccagatgtactaaaccctttgcccttcatctcatcctctctgacttgggaagaaccaggattttgtttttaagcccttgggcatacagttgttccatcccgacatgaactcagcctcccgtctgaccgccccttggccttccttcttcctcgatctgtggaacccagggaatctgcctagtgctgtctccaagcaccttggccatgatgtaaacccagagaaattagcatctccatctccttccttattccccacccaaaagtcatttcctcttagttcattacctgggattttgatgtctatgttccctcctcgttattgatacacacacagagagagacaaacaaaaaaggaacttcttgaaattcccccagaaggttttgagagttgttttcaatgttgcaacaagtcagtttctagtttaagtttccatcagaaaggagtagagtatataagttccagtaccagcaacagcagcagaagaaacaacatctgtttcagggccattggactctccgtcctgcccagagcaaggtaagcacttcccaagcccctacctccctcccctccctgtgggcctgcagctgtccaggtgtagaaaccgttagtgtgctaccccagcagctggcaggagggagttggtggattcctggaagcatccctggtgagtcatctgctggaacattagtgaaaacttagtactctagggaccgatgtacagtgtccattttaaaagccacctaataataactgtatagcaagatctgtgtgtatgcatagtttgtggaaatgtttgttttatcttattttgaagtggtgtgtattgatgtataaaagtatattcctaaatgttaatgcccatcagttaaaggattgtatagagctaaagtgagtggtgcctgccttactattgaaatttttaaaaagcctttcgtgcattccttaaagtaattggattcataattataataatgttacaaatcagacttgctcccatatttgtgatggtcttggtcgtcagttgtgatatcaaccaaaatgacagctgggatccccattcttgtggattaactaactttggccccagttaaaaaatgaaaagctattattgcttcctaaagagtttttaaatctgtgagaagggggaaaaaaaggtttttttacttgcccaggtaaaattgtgtgcaacaacaatgtcattttaacaaagggattactaaaccccaggtgatgacccactttttcaaacaaggaattgcaagatactagatggaatgtgggtaacctcttagagtttagtttactggaatctgaaattgtatgatttccgtacattccttcatgctactaataagtcatggaatccctctgtgctggactctgggggtaaagtgcaaaacaagatagacatgatccatggcataagagagttcactcagtgtggcagagaagacaaacagtaaagaagagactgtattgttgccattgtagtaaatgctgtggaaggaggggagcaaatagtgggtcctgacttcatctaggcaccatgacacttcacgtgaattatgtcactaactccttaccacagtagcatgcccattttatagatcaggagtgtggggcttaaaggggccaagtgactcacccagagtcacacagttctagaagtctgcctggccctcaaactagggatctttgcatgtgccacccatgccatctgtgactatatctttttattctttaataataactcccttttctaattaaaggtaacaaacaaaacttaaaaaagagatgcccacccaagcgtcattggcatgctgatgttggcaccagtgttgggaagcccttagcatactccaggaagtaggagtgtgtaacgtggggtccctttgtccttcatgcaagggtttcaagagtttagaaaacctatgaaattgcacacacaaaaatgtgttttaatcatcaagactctcagacttaccatgctgagaaatgtgggctgagggatagcgctccctagtatcagctgatgggccagagagccaaaggaggagacccaccaccatcacctctcctggacagtgctctgtggtttcaaatgtaggtgatactaaaatgggagttgcttcttagaaccatggccggggttcccttgaccctgaagtgcagttcacctgagattgtcaaatgcatctgaggcatgcagaggaagtgctgggcacacagctagtgggaatacctcagcgtaagtggccaggagatgccaggaatctccactatttcccttccagtgtgccagcctctgggttttacaggcgcatgtaattgcagtacctctgtgcacatttccctactgcctagaatgactttcttgactatccatgatatataaaacacagataccgaattgttcccttacctcttcctctaggttcaagttaatatgttattggttgccttctataatatgttatctcattgcctttcccaacaagcctttgagataagtattaggtccattttatagacaaagagactgaggctcagcgagtaacttggccaacaagttgctcccactgctcaacagcaaatgagcggtgggaccaaaattcaagcctgtgtctgtttaacttcaagcctgtgaatgtactaaccggtgccctgtgccagctagtactttgctacagtcataacctagactgaagtgatagccatgcccctaaaactccatgctgtggtgacagcactgagcagtgtccaagaaggcttgacttctaggcctgtctctgccactcacaaactttataagggaataaagtacatagcaaggtccgcctagagttagtagcagttctgacaaagctgtaatttgtcaatattccgtcacccaacccaggaatgctcatttttaaggtatttgactgaaacagttgagcattgcccttcatatagtttaaaacagtggtttcagaaccactttcctccagaccatgggtgctctgcaaggtgaatggagttgtttcagaatgtttcaataatcatccctacctcattcgtaagtggcatgtaatttttgcaatcggaagattttcataaaccctggatactaacctagactggtttctatatcagatggtggcttatttaacataaaattatgcattttactatttcatggtggatatatcaatatgttgtggtcttttcccaatgaacactttgattttcaggggttctggaccctgaacatgggttaaaccagtggttctcaaggtgtggtcttagcgccagcagcatctgcttcccctggaaactttctagaaatgcatattctcaggccctcatgcctgctgaatcagacactctgggggtgggactcagccgtctgttgtagcagtgcttccaggttatcctgacagtcactcaaattttagaaccactaggttctctatatgggagagagtagtctttgaacttggaaaacaagagaagctaaacccctacagcaagggctggtgaccaggtcgttgccagaacctgaaagttcgcctctgtattaccgttcctgtccctaacccaagtccttcagttctgggtgctccagcacacactgctttgtgctgcagtgatacaaatgtatggctcatctccccagctggcggggaggcatttaacacactgacttaataaatatttattgagtaaaagtatttgctcctaggaagcgggatccaggtaagccctttttttctctctcaactgcttctagcccagtgctctttatgtagtaagcactaaataaacaactgctagatgttgatccagaaagtcacattccttctctaagctttaagtttctcatcttaaaaataagaggattgtatcagatggcttgccttaggtctctttcagctccagagccccaaataccctatggttctctatttagagatgttcttccccacagactgccatagaactcctgtaatttacttagtatttgcttgacagtatggagaagaaaggggagaatcaagattttatttaaaaaaaaagtagctagaatgtgtatatggttcacaaaggtaacaagaattattgacattctttcttctcttttttcttcctcttccttctcttttcctccttctcttccccctgcttctctcccttcttatagatgtgtcaccagcagttggtcatctcttggttttccctggtttttctggcatctcccctcgtggccatatgggaactgaagaaagatggtaaccagcctctcattattctctgtggaggccccacttctaagccaggactcttgggcagccactggtgggaaatcaaactgaaatgggcaaccatgcactgggtcctctagagaaagccatcactctgggaaaatgcaatgccatatctctcttttctactttgatggtatctatattgtttggttttcacattggatgacattggtacactatggtggggaaagacatatgatatatgatatggtggggaaagacatatgacatatgatattttccaatattactaaaaactgtttcacacaattaaaattccaaagtagaggatttgcaaagtataacaactgtgttcgtttctcattccaccacatgatactgccccctcagttggcactgtgatgacttacctctgaccaagcactttggaggaagcataggattcagactcacattgacttgggttcaagtcctaggtctgtcaatgactggttatgtgactttaagctgggtcacctctaatcctgaatttcctcaactgtaaactggatgttacaaagtggatgcctaccacgtgggttatttagtgggttaatgaatgcagaatacaactcgacagatagtaaagtgaaagtaaatgtcagctagtattactattttggttgtttaaaatatctttcatgattcaagagatactttttattatcccaatgatcagtaaaaattattagtagactaatagaatagttaatggtaaaataaggagttctgcccatccttctagtatctcacactcagtaaatgtgcattctgaccgttggctgtacctgaaagaccctcagatttttatcactgaagccaacatcataatgttggcgattactatctttaattgtataataataatagttaatgtttattgagtgcactgtctcacttaattctcacaagagccatatgaagtagagactgtctgtatcccattttacagatgttggaaactgaggccagagagattaagtaacttgcccaatgtcacatacctggtaagggtggaacagggacttgatcccaattctgtcttgcttcaaagctggtgcacttaaatttgtgaaaacgtttttacaaggacatgaagtaattttttcccaggtctttggagagctgaataagaggaaatggacataaattaaggatgaaaatatttcagctgatgatcagaaataatcttttgatattctagaaagtaccatcttgaaatgggtacctgaaagaaatctgggaccactcctctcttctcaagaattttaggaagacagaatccagccaccccttctccatgagaatttgagagatttagacactctcttaagtaaaggcaaaggcctgagccaggggtatatggcagatcccttccaaccctgggattgttagcgagctcaggaaccttggtcctggcatatttgaccccttagtgacttctgatttggtaaaccacagaaattccagaaaatcagtgtgagaaactctccgaggtgtgacttaggagggcagacgatgcagtgaggctaagtgccaggttcttgatgctcctcttcagctttcctcctgcagctgttttccctgctgttgagcaaacatcttctagggcttccgagcctcagttgggacaggaaagtaaccatgctcttcaggtgtcagggggacaaaaaaaaaaccaagaaaaagccaaaagtgccacatggttttacatcagcacagctaatcatttccccagagttggaccccaaatgcttttgacctcttatttttgttatccattcagtccttataatccaattgatgtaaagtgaaaactttatattctacaatgctttacatccagaggccaataacgagaaccaccatttataaagcatgtaagggcactgtgtatgagcttatataatccacatatccaccttctaaagcaagggctaatatttttctcattttaaagatgatgacactgaggcttacagtagttgaatgtcttgccaaaggccacaagactggagcaagggctagagctgcttctaaatccaggcctctgccactccaaaatgcaggctctcaaccactgtgactcataaacttgagcaggcatcagcaccatctggagagcttaagaaccatataactaaatccatcccaaggtttctgattcagcagctgagaatttgcatttctgatctattccaaggtgatgctgctgatggtgtttcatcgatcatgctttgggaactactacattaaacaattctattcaattaataatttatgcatggattaaaaaaatgaatgaagctttgctatgacacactctgaaatactatactaagccattcctcaaaggccagtttagacactagcattaggcatcccttgcaaagcccaagagacaaaaggtctgagctgtagcccttgtacttctgacttgctgtgaccatgcttagatcgttggcctcagtacgcttcttcattaaatgggaagactaagctctactggactgcttcataagagtgtaagatagctaaaaataataataataataataataatgcagagagaatgaaaatctccactggtgatttaaaacagagggaacgaaatccttaaatatccatggaaaattgttaagagagtttctctgtacagttggctgactcctcagtctataagtaacgataactaacaccgaatttactgtgtggcagacactgtgctaagtactttacgtgctttttttttttttcatttaatcctcagtcaaatgtaaggcagatactgttattattatcattttacagatgaggaaactgaggctcatgataatgaaataccttgttccaaatcccccagctggttagtggagacaggatgacagtcttggttcgttgttctcgacaccctgagcttttaaccactatgttactctgctgaatattgtgccctgccgtattctctatgaaactgaaattgtgctggaagtttctctcccccagacctttggcaaagagtcttgtgctgtttgcagtttttggtatattaaggtgtttccaatctgctaaataatcaaaggttactattaaaggcagccttccagtcaatgagtcgatggcagctataaaactctttgtttctcttttccatgaccttgagcccaagcagggtctcatgccttgagatcatctcagcaagcatttgccaaatacttgttgtaaacaaggttgtgtttaggcaatggggatgcccgaagggttaataaaacacagtcccagagttcctggagcttacagcctggttctccactttatgtgcattccagtttatgtcgtagaattggattggtatccggatgcccctggagaaatggtggtcctcacctgtgacacccctgaagaagatggtatcacctggaccttggaccagagcagtgaggtcttaggctctggcaaaaccctgaccatccaagtcaaagagtttggagatgctggccagtacacctgtcacaaaggaggcgaggttctaagccattcgctcctgctgcttcacaaaaaggaagatggaatttggtccactgatattttaaaggaccagaaaggtaattctatacccttggatagtatcaattttctctttcgctcataagagttaaaaacaacaacaacaacaaattgaaaagccaagtcatggtgagtgtaatgaattaacatcaagtctcttattgatgttaattgatgttaacctccattttcctttgctttcctggaccctttgggttatcaaccatcaaaatctcatattaagggagtttcatgatcagtctgaatgcttagcctcatgttttctttaaataatggtgatattatttaatggctaatggaaattaaccgatagtgtatcactctgcactggggtgatagccttcaaaaaatgaatgcctctgccaggcatgttaggtgtgtagtgtactctgcagaatcaacaccccactgggatactcccaatccttatggagctacccaagaggcaacgcatggaagaacttcaccctgtaccatctggtgatctgtgattcatcacaatcaaaacctttctgcaaaaaactcctaaatattgaatttttgtttttttcaaatccagaacccaaaaataagacctttctaagatgcgaggccaagaattattctggacgtttcacctgctggtggctgacgacaatcagtactgatttgacattcagtgtcaaaagcagcagagggtgagtgaaactgctctggtttctcagcatttttctagaactatttcattaagaaattaagggcaacctctcagtgacctatcagttaatgataatgggaaaagcaaagtcaaacccgtgttttttcaaccgcccttccttgtctacattgaagaaagaacatggagattttagccgattgcttgaataaatgtatgtgttggggcaggatattattgggaactgagaatagtctctgctgtgtttgaacccactcatccaaattgcctggccatgcttcctgaagcctcatagcaccaaagaaagggataaacggagaattcaaagctacaaatgacttgctgaaattgcaccttgagtcaaaaataaaaacaagagctccagggcgtagatcttaggggccctgaagcagactccaaaactcgatgaggcctcccgaaattttcccagggccacctcaactccttttacttctgctgacaccactaatctgaagttcgctgttggtccaatgcacctggactttccgtaagaaagcaacttccataaatacaagacctatgtgttaacccccatgtggcttactttaatcatcaccgaagcaaaccccaggtgatcatcctgactttaccattatttcactgagtaaattaagcattggggtctcactttttcatctttaaaaggaaaatgcttactaaagaaatgtttctccaagtgcataaagacataatcagcagaggaatggttaaataaaacatggtacactatactcttgcttaatgtgcagtcattgaagtggataacccaacccatatgttttgtcatggagagctccccataatatgttcagaggggaaaaggatggttacataatcatatgtatacaatttgatcctagttcataaaaataaaatctatatgtataagtaaaatatatatagtggatatatataatgtagagatgtatataacatggattatatatataatgtgtgtatacatatgtgtgtgtgtgtgtgtgtgtatatatatatatatatataaaatgtgtatacaattatcttgaatattcattgaaaaagttctggccaggcacagtggctcacacctgaaatcctaactctttgggaggctgagacagaatgattgcttgaggccaggagttcaagaccagcctaggcaacacagtgagaccccatctcagaaaatattaaaaataaaaaaattaggtgggtgtggtggcacacacctgtagtcccagctacttgggaggcagagggaggggatcacttgagcctaggagtttgaggctacagtggggtctgattccaccacttcactccagcctgggtggcagagcaaaaccctgtctcttaaaaaaaaaaagagagagagagagagaaagaaaaagaaaaaggaaggtctggaaggatacaacaagctattattagtacttaaacctgtggagagcagttaaggatgaaggagacatacacttctttcctttatatggatctttatcatctttacttttataattagtgtgtactgatttgtgtattgattttataattaaaatgggaaaaaatgaatttaagtttttaacaagggggtttaataatcagagattctagatctaaaacaaacaaaaacttccatattcatttagtccagagacatgtaagtgctcttgaatttaagctttttctcctggggagggcagtttcttaccctctgggtagaaatcagcccagttggagaaactgtgtcctcagacaacagttgaggccttacctgccttactggctacaatcactaggaactctctccccaatgtgtaacacaggctaatttctgtctttgacttcagctcttctgacccccaaggggtgacgtgcggagctgctacactctctgcagagagagtcagaggggacaacaaggagtatgagtactcagtggagtgccaggaggacagtgcctgcccagctgctgaggagagtctgcccattgaggtcatggtggatgccgttcacaagctcaagtatgaaaactacaccagcagcttcttcatcagggacatcagtgagttttggatgattatatgtgctccataaggaaagatactatttgtcacgtgttcacaatgccccatgcactgtggggtaggtggttgacaagcatcatctcttttattctgcatccaaaaacaaaatacgatgtagatactgttatctgcattttaaggaagaggaaattgagtcttagaaaagttaagcaacttgccccagatctcagatcttacagctagccgttcaaatccagatccactccactacagctgctctttactgcactttgattcagctgccagatagtttccatgatgaatcccagagcctaatcaagcataatattcatattcagaaccagggcttccttactaatggcaattattcccaaccaatccttccttagcatttgaaaagggacttctttcttagaatataaacccttccaaaatggacatctttttttttaattggcagatagggatttcaccataagtcatttcctttactatttattcattgaccaggcagcatgataaagtgtaatagaaccagagaacttgcttcaaaacttatggagggtttgtacttggtgggtggggtctagttcacatagggtggccaaggaaggcctctctgaggaggtgacatttagctgacaccaaaaggaaagatgtcagttgtgttaagagcagagggaagcatatgtgcgaagcacctgctaggagccgtgatctttgtgtggagcagtgccaggcctacagagcccaaccacacaccctagcatgtctctgcctcctcttatctagaagacctaattgaggaaggagtctttgtgaaactcactgctgtatccttcatgcacagtccagtggctggaacataatgggcgctcagtattcatggaataaacaagcaaattgagcatagagacaattgactgtaactgctccaagacatgtccgcaccaaaagctatgaaaagacaaaagaaagggcagtaaatagaaaatctatcatctcatccccagggagaggctcagcttagttccatgttcagtgcaaagtgagggattagcacagacagggtggtccttcaatgcatggcccataaccattaaagcagaggtcttctcactgtgcggtcccatctgattgttcagtgatgaggattctgagcatctctcagatcctgcaatacatgtggatctgagatgtggccattgataatgactgccttcccgaggcaccagcgtgagcacctgcggcagaggtgcctcacatttgccagccaggtgctcacagaagttaagtaactatccagtggactcacagctgatcaaaggtgcaagtgagatcataagccaaaaccactgaactccaaagccttattaggaaaataaagcatgtttatcctcttccacagtcaaacctgacccacccaagaacttgcagctgaagccattaaagaattctcggcaggtggaggtcagctgggagtaccctgacacctggagtactccacattcctacttctccctgacattctgcgttcaggtccagggcaagagcaagagagaaaaggtaagaagtgattcaggtgcagtatattccttggtcagttttacggaggcccaccataaagtgagaagatgaatgatgataataacaatgacatccatgtatcacttaacaacagggatacattctgagaaattcatctttaggcagctatatcattgtgcaaacatatatggtgtacccacacaaacctagatggtatagcctactacgcttctaggctttatggtatagcctattgctcctaggctgcaaacctgtacagcatgttcctgtactgaatactgtaggcaattacaacacaatggtttgtatatctaaacagaaaagatatagcaaaaatacaatattataacaatataggaccactggtcatatatgtgatccttctttgactgaaatgttattatgtgatgcataattacttttcttagcacttttctatgtgtctagagctgtgccaagggttttccatgtttatttcacttaatctacaaaattaacgcaacaaaggtagctgatgttattcttgtttttttacccccttttttgtggaaaagaggctttccttttttccagaaactgtggcaaggtaaagtaaagctgtagctgatgcaggaattttgtgtaggtgttagcagcactgccctcactacgtgctcattggacagtagcccaaccccaagaaaaggatggttggtagccagtagtattatcatcatttcacaagtgattgaagactcagagaggttaagtgactttaccaaggtcacccagctaggaaatgacataaccaagacataaactcaatctgccagacagaaaggccatgcacctaaccactccactacctctgatgttggtcattgatcttggcactcagaattagtcctgatagaggagacctgggctccagaagcctaaaattgttgtttcaactgagtgcatgtaatgaatgatagaacaggcaagagatatcgcccccaaaatggatagctcctggctgttccagatattataaaattattttactaaacagaatgtctacacttatagaggctaagatattggcttcccagcttcctcaccttacagcagaattcctttgcctgttgcaaggttccagaggcccttttgtaccgccccagactcctttcaccccacttttaaaatcactggacaaagccctaattcagcatagcatttagcatgtggtagaaattcagtgagctagttactctctgggaaaataattaggtagggaggctatcctggaatagatatttacctaaatattattttacatcttggcaagtactttccctatttaagatctgtatgactaataggtgatattgagtgcttcctatgtgctaaagacttgctaagagtttgacgtgatttttaccttgaactataattctatgaagtaggcattattgttatccctatttataagtgaggaaacagacacagagaacctaagacattttcctgaagttacacagctattaagtagcagtgccagaatttgaaggcaagttttctgatgaaatgatcaggatatggtatttctcaatatctcagggatggctagagcaaatctgtctctctctcaccatcagctcaggactgggtgagtggccatggggtcttgaggcaaggcaattgtgctagaaagatgaaagctgggccaaacgatttctccctcaagggcttacaaagtacaaaagctgcacctacatgtggagtgtctgccagtaggtggtgcaagttctatgcacacccctgtgaattgcaagcacagtgccctaagaccaagatgggcttgttttgggagagtatgcattgcagaaacaggctcagcttaccctgtgactatgttgccaaggggtcttcacagctttccttctcttttgcagaaagatagagtcttcacggacaagacctcagccacggtcatctgccgcaaaaatgccagcattagcgtgcgggcccaggaccgctactatagctcatcttggagcgaatgggcatctgtgccctgcagttaggtgagcaggccctcaaaggccagcccaggcctgcactctcagtgcacctggatgcagggatatgattgggggctgtgttggagaggaaagggggatggagtggccagcacccagttgccagaatcagaaacatacatttattcactaacagatatttatttggtgcctttgttatgtaggacactgtgctggccacagggatattgcaggaaagaaaacagaccggggttctggcctcctaaagagaaaggcaaagaaaagagagaggtagccaggaggcagagcatggaggacttgcaagcttgcaggactcagaatcttgttctgggggccccgggccctgaaacccactgaagggttttcagcaaggaagtaacacaatcagatattattttaagaaaaccctcaagaaagcctctggcaagcatggtgccagccaaattccaggccacataaggaaggcctgggccttctggcatgaaatccctgaaacccagttgcccaggatcatatgttgtgagaaataagaagagacattgctgttacaatgtcaccccacatcaacttttggcattctcttccaggttctgatccaggatgaaaatttggaggaaaagtggaagatattaagcaaaatgtttaaagacacaacggaatagacccaaaaagataatttctatctgatttgctttaaaacgtttttttaggatcacaatgatatctttgctgtatttgtatagttagatgctaaatgctcattgaaacaatcagctaatttatgtatagattttccagctctcaagttgccatgggccttcatgctatttaaatatttaagtaatttatgtatttattagtatattactgttatttaacgtttgtctgccaggatgtatggaatgtttcatactcttatgacctgatccatcaggatcagtccctattatgcaaaatgtgaatttaattttatttgtactgacaacttttcaagcaaggctgcaagtacatcagttttatgacaatcaggaagaatgcagtgttctgataccagtgccatcatacacttgtgatggatgggaacgcaagagatacttacatggaaacctgacaatgcaaacctgttgagaagatccaggagaacaagatgctagttcccatgtctgtgaagacttcctggagatggtgttgataaagcaatttagggccacttacacttctaagcaagtttaatctttggatgcctgaattttaaaagggctagaaaaaaatgattgaccagcctgggaaacataacaagaccccgtctctacaaaaaaaatttaaaattagccaggcgtggtggctcatgcttgtggtcccagctgttcaggaggatgaggcaggaggatctcttgagcccaggaggtcaaggctatggtgagccgtgattgtgccactgcataccagcctaggtgacagaatgagaccctgtctcaaaaaaaaaaatgattgaaattaaaattcagctttagcttccatggcagtcctcacccccacctctctaaaagacacaggaggatgacacagaaacaccgtaagtgtctggaaggcaaaaagatcttaagattcaagagagaggacaagtagttatggctaaggacatgaaattgtcagaatggcaggtggcttcttaacagccctgtgagaagcagacagatgcaaagaaaatctggaatccctttctcattagcatgaatgaacctgatacacaattatgaccagaaaatatggctccatgaaggtgctacttttaagtaatgtatgtgcgctctgtaaagtgattacatttgtttcctgtttgtttatttatttatttatttttgcattctgaggctgaactaataaaaactcttctttgtaatcatattttgggcattctcagctgatttgagtactctgcttgcaagtctaccaggggtgcattttttcccctatcatttaagcattgccctttcttgaagtgatcccattccaaattttgcagagttgctctttccccttatagtatttccaaagtcagtgtcttcctgagctcaggggatgtccctgtaatctgacaaggaaggatcctttgcaagggcactgaactgcattgtgccttttttaggggtggaagctctcacttattccaccctctatcctggaatcgactctactggtatcccaagaatcatgaaataaaactctaacctggtacagccatggacatctcagctcttaggtccagctctagtatttattgagagtttgccgtatatatggacatgtgctagccctcagggttgggaagtttcaaaaagccttgcattgtgtctcccaaacagtgcccactcctaacactgcttataaggcaggatgaaaagttaacttcactatcattacacgctaaaatgttcaggatatatggtagcctggggtgagaatgaaaaagaaggatctgtgtaacccagcaccatccaggaagactcatcagagaagagagggtgccaactttgggctaaagaatgggcagggcctgcaaattccccttggtgcttcccatggaaggaggagatggtgggatcagagggaatgcagtccaatttcctgctatcccaaaaatccaagtgtgcacattcaggcttccttgcaatggcagggtaattataataggggtgtttgtttacattcctgattttcagtgtcccctggagccctatgccactctgctcctggcctggaggaatggtgggtggcttctgtcattctttgccaacctttggagcatatggtcccgtgttataagcccacacttgacagcatatggttgttaataacaagtgtttgtccccctacagggtctttcatctgcagttaccaaagtacttaacggacatttaatgaacaacactaaccagatttttaaaaaataaataactaatcacatttcataagcactgagaactgggacctttccccaaatttctggccagcctggggcagaggtgagatgttctggctcccaccatgcccagtgcttttgcgacatgacctcttagcattcgattaatttcagtgcatgcaatgcagagtttttcttctttaaagatagtctccaggactgtcctttttattgtaaatctagccactacaaaatgtactaaatgtctaagccaaagatcttaggactgggaatcagaggagcagactccagtcccaactatggttacataacagacttgtgaccttgagcagggtgttggaaacagcctgctggttttccaatcaatactcattcccaactgttttctccccgatgccctcttcagctctaaatgttggtaagtttagcgaccactttttcagccacctttgttgcccagcaaagccaaaacactgagttctggccaatgagatataagaaaattctgctgggagggttgctgagaagctttggcttttctgatgaaagacagagccatgtctagcatcaccctttccttccatcctcctctcttgagcagaaaaaaatctcgagaagcttcagaggacaccttgtgcccagtatgaaagccatcatgcaaaaactcaagctagagacttcaggctaggcgctgtggctcatgcctgtaatcccagcactttgggagactgaggtgggcagatcacctaaggtcaggagttcaagaccagcctggtcaacatggtgaaaccccgtctctaccaaaaaagtacaaacattagctgggcatggtggtacactcctataatcccagctacttgggaggctgaggcaggagaatcacttgaacttaggaggcagagtttgcagtaagcagagatcacacaattgcactccagcctgggcaacagagtgagactttgtctcaaaaaaaaaaaaaagaaagaaaaagaaaaagaaaagaaaagaaaaaagccagactccagatcctcatggcatcatggagcagctgaaccaaccactgtatctacctaccccagatttcttgacatgtgagagagacagatccatatttgtttcttttttttattgtggtgaaatattcataacataaaatgtaacattttaaccattttcaggtgtacagttcagtggcattaaatacattcatattgttgtgcaaccatcactccacccatcaccagaactatttaatcagacccccatctatgagaggctgctggccaagtcagaaaaaggacccatgccagcacaggaagaaacctggggtttggtgtcagaaaacctggttctgcccctcacagctggcatgggcctggtgaagacacggagtactcgatttccagagacatcaggtggggctttggtgataccctgcttcgctgacctctgtgaggtgtaaaacaagtgaggacataaacctgcaggccccctcctgaaatcttcaagtgtcatacccttaggagtccgtctccccactcccatgttcaagaagaaagtgagaaaactaagcaccaaaggcagccatagaagctgcctcacgaggtccctaacaaccctgtgcaggaggaattctcatcccattattacagataaggaaactatggccaaggtccctgttccaagggcagcctgagcatcagcaggactcacctgaaggcggggagagattggggatcccacaggaaagcacctctactgtcctttcattcagtatttttggagtccctggtaccgtctctgtccttggcaccatcctcaactttttggatacaggggtgagtgagcccctgccttcccat

SEQ ID NO: 318 - DNA, 2148 bp, Homo sapiens
agctcccatgcagcccacagccctaaaggccggtttcactcccaccatgccccaccaacagcaatgagtttacttccaggaagctggtgagcagggctgagaacttgctccaggctacaagcctcccagctgagaaaacgagcgaactcacagttcctcgactgtcccatggagcttgcagtggcaatccgcctccttcaaagggtctgtggactttctcggctttcctggaattagcagttcacaaagcacattcgcatataagggcttgttttgaattgatcttggcagcaattctatgagacaagtaaaagcacaagaggaataggaactgcacctcttccttcagtttcagcttgaataatatcaggaagattcgtatcggtctgagttgggtcacgtacccgacgtgctatagctgaggatgggctgacttgtatgaagaaggaggtggaggaggaggagaaggtgaagacaatgctgactcaaaggggggattataaaactaatcatcaaagccaagaaggcaagagcaagcatgtaccgctgaaaacacaagataactgcataagtaatgactttcagtgcagattcatagctaacccataaactgctggggcaaaaatcatcttggaaggctctgaacctcagaaaggattcacaagacgatctgccgaccctctgggagaaaatccagcaagatgcaagccttcagaatctgggatgttaaccagaagaccttctatctgaggaacaaccaactagttgctggatacttgcaaggaccaaatgtcaatttagaagaaaagatagatgtggtacccattgagcctcatgctctgttcttgggaatccatggagggaagatgtgcctgtcctgtgtcaagtctggtgatgagaccagactccagctggaggcagttaacatcactgacctgagcgagaacagaaagcaggacaagcgcttcgccttcatccgctcagacagtggccccaccaccagttttgagtctgccgcctgccccggttggttcctctgcacagcgatggaagctgaccagcccgtcagcctcaccaatatgcctgacgaaggcgtcatggtcaccaaattctacttccaggaggacgagtagtactgcccaggcctgcctgttcccattcttgcatggcaaggactgcagggactgccagtccccctgccccagggctcccggctatgggggcactgaggaccagccattgaggggtggaccctcagaaggcgtcacaacaacctggtcacaggactctgcctcctcttcaactgaccagcctccatgctgcctccagaatggtctttctaatgtgtgaatcagagcacagcagcccctgcacaaagcccttccatgtcgcctctgcattcaggatcaaacccgaccacctgcccaacctgctctcctcttgccactgcctcttcctccctcattccaccttcccatgccctggatccatcaggccacttgatgacccccaaccaagtggctcccacaccctgttttacaaaaaagaaaagaccagtccatgagggaggtttttaagggtttgtggaaaatgaaaattaggatttcatgatttttttttttcagtccccgtgaaggagagcccttcatttggagattatgttctttcggggagaggctgaggacttaaaatattcctgcatttgtgaaatgatggtgaaagcactgctgcccagcctccaagctccatctccactccagattttttacagctgcctgcagtactttacctcctatcagaagtttctcagctcccaaggctctgagcaaatgtggctcctgggggttctttcttcctctgctgaaggaataaattgctccttgacattgtagagcttctggcacttggagacttgtatgaaagatggctgtgcctctgcctgtctcccccaccgggctgggagctctgcagagcaggaaacatgactcgtatatgtctcaggtccctgcagggccaagcacctagcctcgctcttggcaggtactcagcgaatgaatgctgtatatgttgggtgcaaagttccctacttcctgtgacttcagctctgttttacaataaaatcttgaaaatgcaaaaaaaaaaaaaaaa

SEQ ID NO: 319 - DNA, 7130 bp, Homo sapiens
accagaagctagaagagaggcatggaacaacttcttcctcagcgcctccagaagggaccaaccctggccacactgatttcggacttctgggctccagaactgtgagaaaataaatgcctttttttcctttttaaaaaatttttatttatttatttatttatttatttatttatttatttatttatttgagatggagtctcactctgttgcacaggctagagtgcagtggcgcaattttggctcactgcaacctctgcctcctagattcaagcgattctcatgtttcagcctcccgagtagctgggattacaggtgtcgccaccatgtctggctaatttttgtatttttagtagagacggggtttcaccaggttggccaggctggtctcgaactcctcaagcaatccacctgccttggcctcccaaagtgctgggattgcaggcgtgagtcactgcacccagccgagagaataaatttctgttggtttaagccactcagtttggggataacttatggcagccctagcaaactaatacatactaaagatacatactaaatactaagctgggccatatagtccagttttcctgagactcccaggcaagtgctgtttttctttgcttaatatcctacaccactttctgtctggtaaaattacactcattctttaagatgccactgaaatagcacctcttcagcacagccttcactaaactatccccctctccatcttggtaaatttagttacttcctcttctgtgctcacatactttgtagtatctctacatttatgctataggacttgttacactatgttgtattacttgtttatgtcttccccacttttctgtgagtgtctagaaatatgaggatgtcttgttggtctatttccagaacataagcacagtgcctggcacatattaaaaacgtaataaatgtttgctgaataaatagtttctgtaagtggcttctccaatcacctctgtgttttcggggaaggtaaaactggcaacaggatgaagaatggattagagagcagagggcctttagaaagggaggccagttgatggagtctagatagaatcatgactagagctaatgaaagactgatttagcagagtggctgtggtaatggaaaggaggaaaccgttgggagaaacaccacagaagcagagtgggttatattctctgggtgagagagggggagaaattgaagctgattctgaggtttcaagtctgggtgactgagagggtgacgataccattgactgaggtggggaaggcaggaagagaagcagagttgggggaagatgggaagcttgaagctagtattgttgttcctccatttctagaatatttttgtattataagtcacacttcctcgccagtctcaacagggacccagctcaggcagcagctaagggtgggtattctggtttggattagatcagaggaaagacagctgtatatgtgcccacaggagccaagacggtattttccatcctcccaaaacagtagagctttgacagagatttaagggtgaccaagtcaaggaagaggcatggcatagaacggtgatgtcgggggtgggggttcagaacttccattatagaaggtaatgatttagaggagaaggtggttgagaatggtgctagtggtagtgaacagatccttcccaggatctaggtgggctgaggatttttgagtctgtgacactattgtatatccagctttagtttctgtttaccaccttacagcagcacctaatctcctagaggacttagcccgtgtcacacagcacatatttgccacaccctctgtaaagccctggtttataaggttctttccaccggaagctatgacagaggaaacgtgtgggtggggaggggtagtgggtgagggacccaggttcctgacacagacagactacacccagggaatgaagagcaagcgccatgttgaagccatcattaccattcacatccctcttattcctgcagctgcccctgctgggagtggggctgaacacgacaattctgacgcccaatgggaatgaagacaccacagctggtgggaaatctgggactggagggggctggtgagaagggtggctgtgggaaggggccgtacagagatctggtgcctgccactggccattacaatcatgtgggcagaattgaaaagtggagtgggaagggcaagggggagggttccctgcctcacgctacttcttctttctttctttcttgtttgtttgtttctttctttcttttgaggcagggtctcactatgttgcctaggctggtctcaaactcctggcctctagtgatcctcctgcctcagcctttcaaagcaccaggattacagacatgagccaccgtgcttggcctcctccttctgaccatcatttctctttccctccctgccttcattttctccccaatctagatttcttcctgaccactatgcccactgactccctcagtgtttccactctgcccctcccagaggttcagtgttttgtgttcaatgtcgagtacatgaattgcacttggaacagcagctctgagccccagcctaccaacctcactctgcattattggtatgagaagggacgagggggaggggatgaagaagaggtgggttggatcagagaccaagagagagggtagcaagtctcccaggtaccccactgttttctcctggggtaagtcataagtcggttgaggggagatgaggctaggctctggatatctgcagtacccagattggccccactgttcctcttccttccaacctttctcctctaggtacaagaactcggataatgataaagtccagaagtgcagccactatctattctctgaagaaatcacttctggctgtcagttgcaaaaaaaggagatccacctctaccaaacatttgttgttcagctccaggacccacgggaacccaggagacaggccacacagatgctaaaactgcagaatctgggtaatttggaaagaaagggtcaagagaccagggatactgtgggacattggagtctacagagtagtgttcttttatcataagggtacatgggcagaaaagaggaggtaggggatcatgatgggaagggaggaggtattaggggcactaccttcaggatcctgacttgtctaggccaggggaatgaccacatatgcacacatatctccagtgatcccctgggctccagagaacctaacacttcacaaactgagtgaatcccagctagaactgaactggaacaacagattcttgaaccactgtttggagcacttggtgcagtaccggactgactgggaccacagctggactgtgagtgactagggacgtgaatgtagcagctaaggccaagaaagtagggctaaaggattcaaccagacagatagaaggacctaatatcaagctcctgttctctgcctcccagcttctctgctcaccccctaccctccctcctccaactcctttcccccctattttctccagtgagttttctttttttcttttcttttctttctttctttcttttttttttttttttgagacagagcctcactctgttgcccaggcttgagtgcagtggggcgatcttgggctcactgcgacctctgtctccctggttcaagtgattctcctgcttcagcctcccaagtagctgggagcatgcacaaccatgcctggctaatttttgtatttttagtaaagacagggttttgccatgttggtcaggctggtcttgaactcctgacctcaggtgatctgcccacctcggcctcccaaagtgctgggattacaggcgtgagccaccattcctgacaccagtgagttttcattagggattccctacccatactcttcctgataccagatagacaagtaaacaaaaggaagccattaaggggatccagaggggaggcattagattcaagtcagtgaagggagcagtgtggcttgagtagtcaagagatgagagagaaactgggcagtagcagagatgacactggtgggtgttcaggagtatgttttaattctcccttctctcatagacacccactttccctcatcctctttctcctcaaggaacaatcagtggattatagacataagttctccttgcctagtgtggatgggcagaaacgctacacgtttcgtgttcggagccgctttaacccactctgtggaagtgctcagcattggagtgaatggagccacccaatccactgggggagcaatacttcaaaaggtaaaatgggcccacatgacccaatccatgagcccaacaccccagcctttctaacaccactgtcttttgctccacttccctgtcactaaagcccctaaacttggtgccccatctctccacactgtctaaccccaacctctagaaatcaaggtttttctgtgtagggttgggttagcgtgttgttagagtaggggagtggattgagaaggaggctgaggggtactcaagggggctatagaatgtataggatttccctgaagcattcctagagagcctgcaaggtgaagatggctttggaaccagctggatctaggctgtgccacatactacctctttggccttggccacatccctaaactcttggattctgtttcctaagatgtaagatggaggtaattgttcctgcctcacaggagctgttgtgaggattaaacagagagtatgtctttagcgcggtgcctggcaccagtgcctggcatgtagtaggggcacaacaaatataaggtccactttgcttttcttttttctatagagaatcctttcctgtttgcattggaagccgtggttatctctgttggctccatgggattgattatcagccttctctgtgtgtatttctggctggaacggtgagatttggagaagcccagaaaaatgaggggaacggtagctgacaatagcagaggagggttttgcagggtctttaggagtaaaggatgagacagtaagtaatgagagattacccaagagggtttggtgatggaaggaagccacaggcacagagaacacagaatcactttatttcatatgggacaactgggagaagggtgataaaaaagctttaacctatgtgctcctgctccctctttctcccctgtcaggacgatgccccgaattcccaccctgaagaacctagaggatcttgttactgaataccacgggaacttttcggtgagaacgctgtcataagcatgctgcagtctatcaactgccaactgcctgccagcaagacagacagagtgtgggggtgggggcagagaggagagggaaggaggccctgcactaactgtcaggatgtggccgaccaaatggggcatggactatacagagagagacacacacagaagtgcagattatagattgaatgaggcagatggcaactggtattgggggcccaggagcctgtgtatcccttctgtaatcaattacagtggttgcagacatcatgagtactcctttggcacagagctcggtcttttacttcctgcccctaattgacccctgacctggacatatctgtctttaggcctggagtggtgtgtctaagggactggctgagagtctgcagccagactacagtgaacgactctgcctcgtcagtgagattcccccaaaaggaggggcccttggggaggggcctggggcctccccatgcaaccagcatagcccctactgggcccccccatgttacaccctaaagcctgaaacctgaaccccaatcctctgacagaagaaccccagggtcctgtagccctaagtggtactaactttccttcattcaacccacctgcgtctcatactcacctcaccccactgtggctgatttggaattttgtgcccccatgtaagcaccccttcatttggcattccccacttgagaattacccttttgccccgaacatgtttttcttctccctcagtctggcccttccttttcgcaggattcttcctccctccctctttccctcccttcctctttccatctaccctccgattgttcctgaaccgatgagaaataaagtttctgttgataatcatcaaaaatgtctgtcatgggggtggggagcaggggaagcctgggatgcaatgagggtgggaggggaagaaaaaggagtagtacattcatgctgtggaggcaggagtattaccaatttgctagaaagagtactgttctggaaactgacttttttccaggtgccctgcactcattccagggtttagtttagagttagacttacaatgggctgggcgtggtggctcacgcctgtaatcccagcactttgggaggccaaagcgggtggatcacgaggtcaggagatcgagaccagcctggccaacatggtgaaaccccgtctctactaaaaatacaaaaattagccaggcgtgatggtgtgctcctgtaattccagctacttgggaggctgaggcaggagaatcgcttgaacccaggaggtagaggatgcagtgagccaagattgtgccactgcactccagcctgggcgacagagggagactccatctaaaaaaataaaaaaaataaaaaaagttagacttaccatgttgtcccccctttccaactaatctttaacataccccacccaagtttttctctccttacccttactccactttttggccacacctgccacttctgacctcataatcccttaactgcagtctcaggccccacccctggggatactggttatccacaactatcaacagctctctcctgcctgtccagcctgggcatcctcagcctatgaaatccatctgcctctctagtccaccaaccctataggcctatttgccccacacaaggcctctagaacaccctccttctgcatgactcatcagggcactttgtgaagagtgaggcgatcttgagggcatgttcatcttcatcaaacatggaggtgaggggcagcacagaactagagtctgtggatgggggtggagggatctgagggcagtggagatcacagaaatgggcccatgtgtcccatcctatctcttctcagataatcagcagtttctggtcaataccaactgtgctgtcgtcgtgttgctgtattacat

SEQ ID NO: 320 - DNA, 3217 bp, Homo sapiens
ggcgctgtggcaggaagccaccccctcggtcggccggtgcgcggggctgttgcgccatccgctccggctttcgtaaccgcaccctgggacggcccagagacgctccagcgcgagttcctcaaatgttttcctgcgttgccaggaccgtccgccgctctgagtcatgtgcgagtgggaagtcgcactgacactgagccgggccagagggagaggagccgagcgcggcgcggggccgagggactcgcagtgtgtgtagagagccgggctcctgcggatgggggctgcccccggggcctgagcccgcctgcccgcccaccgccccgccccgcccctgccacccctgccgcccggttcccattagcctgtccgcctctgcgggaccatggagtggtagccgaggaggaagcatgctggccgtcggctgcgcgctgctggctgccctgctggccgcgccgggagcggcgctggccccaaggcgctgccctgcgcaggaggtggcgagaggcgtgctgaccagtctgccaggagacagcgtgactctgacctgcccgggggtagagccggaagacaatgccactgttcactgggtgctcaggaagccggctgcaggctcccaccccagcagatgggctggcatgggaaggaggctgctgctgaggtcggtgcagctccacgactctggaaactattcatgctaccgggccggccgcccagctgggactgtgcacttgctggtggatgttccccccgaggagccccagctctcctgcttccggaagagccccctcagcaatgttgtttgtgagtggggtcctcggagcaccccatccctgacgacaaaggctgtgctcttggtgaggaagtttcagaacagtccggccgaagacttccaggagccgtgccagtattcccaggagtcccagaagttctcctgccagttagcagtcccggagggagacagctctttctacatagtgtccatgtgcgtcgccagtagtgtcgggagcaagttcagcaaaactcaaacctttcagggttgtggaatcttgcagcctgatccgcctgccaacatcacagtcactgccgtggccagaaacccccgctggctcagtgtcacctggcaagacccccactcctggaactcatctttctacagactacggtttgagctcagatatcgggctgaacggtcaaagacattcacaacatggatggtcaaggacctccagcatcactgtgtcatccacgacgcctggagcggcctgaggcacgtggtgcagcttcgtgcccaggaggagttcgggcaaggcgagtggagcgagtggagcccggaggccatgggcacgccttggacagaatccaggagtcctccagctgagaacgaggtgtccacccccatgcaggcacttactactaataaagacgatgataatattctcttcagagattctgcaaatgcgacaagcctcccaggttcaagaagacgtggaagctgcgggctctgaaggaaggcaagacaagcatgcatccgccgtactctttggggcagctggtcccggagaggcctcgacccaccccagtgcttgttcctctcatctccccaccggtgtcccccagcagcctggggtctgacaatacctcgagccacaaccgaccagatgccagggacccacggagcccttatgacatcagcaatacagactacttcttccccagatagctggctgggtggcaccagcagcctggaccctgtggatgataaaacacaaacgggctcagcaaaagatgcttctcactgccatgccagcttatctcaggggtgtgcggcctttggcttcacggaagagccttgcggaaggttctacgccaggggaaaatcagcctgctccagctgttcagctggttgaggtttcaaacctccctttccaaatgcccagcttaaaggggctagagtgaacttgggccactgtgaagagaaccatatcaagactctttggacactcacacggacactcaaaagctgggcaggttggtgggggcctcggtgtggagaagcggctggcagcccacccctcaacacctctgcacaagctgcaccctcaggcaggtgggatggatttccagccaaagcctcctccagccgccatgctcctggcccactgcatcgtttcatcttccaactcaaactcttaaaacccaagtgccttagcaaattctgtttttctaggcctggggacggcttttacttaaaccgccaaggctgggggaagaagctctctcctccctttcttccctacagttgaaaaacagctgagggtgagtgggtgaataatacagtatctcagggcctggtcgttttcaacagaattataattagttcctcattagcattttgctaaatgtgaatgatgatcctaggcatttgctgaatacagaggcaactgcattggctttgggttgcaggacctcaggtgagaagcagaggaaggagaggagaggggcacagggtctctaccatcccctgtagagtgggagctgagtgggggatcacagcctctgaaaaccaatgttctctcttctccacctcccacaaaggagagctagcagcagggagggcttctgccatttctgagatcaaaacggttttactgcagctttgtttgttgtcagctgaacctgggtaactagggaagataatattaaggaagacaatgtgaaaagaaaaatgagcctggcaagaatgtgtttaaacttggtttttaaaaaactgctgactgttttctcttgagagggtggaatatccaatattcgctgtgtcagcatagaagtaacttacttaggtgtgggggaagcaccataactttgtttagcccaaaaccaagtcaagtgaaaaaggaggaagagaaaaaatattttcctgccaggcatggtggcccacgcacttcgggaggtcgaggcaggaggatcacttgagtccagaagtttgagatcagcctgggcaatgtgataaaaccccatctctacaaaaagcataaaaattagccaagtgtggtagagtgtgcctgaagtcccagatacttggggggctgaggtgggaggatctcttgagcctgggaggtcaaggctgcagtgagccgagattgcaccactgcactccagcctgggtgacagagcaagtgagaccctgtctcaaaaaaaaaaaaaaaaaaaaaaaaaa

SEQ ID NO: 321 - DNA, 1503 bp, Homo sapiens
cctccctcccttcctcttactctcattcatttcatacacactggctcacacatctactctctctctctatctctctcagaatgacaattctaggtacaacttttggcatggttttttctttacttcaagtcgtttctggagaaagtggctatgctcaaaatggagacttggaagatgcagaactggatgactactcattctcatgctatagccagttggaagtgaatggatcgcagcactcactgacctgtgcttttgaggacccagatgtcaacatcaccaatctggaatttgaaatatgtggggccctcgtggaggtaaagtgcctgaatttcaggaaactacaagagatatatttcatcgagacaaagaaattcttactgattggaaagagcaatatatgtgtgaaggttggagaaaagagtctaacctgcaaaaaaatagacctaaccactatagttaaacctgaggctccttttgacctgagtgtcgtctatcgggaaggagccaatgactttgtggtgacatttaatacatcacacttgcaaaagaagtatgtaaaagttttaatgcacgatgtagcttaccgccaggaaaaggatgaaaacaaatggacgcatgtgaatttatccagcacaaagctgacactcctgcagagaaagctccaaccggcagcaatgtatgagattaaagttcgatccatccctgatcactattttaaaggcttctggagtgaatggagtccaagttattacttcagaactccagagatcaataatagctcaggggagatggatcctatcttactaaccatcagcattttgagttttttctctgtcgctctgttggtcatcttggcctgtgtgttatggaaaaaaaggattaagcctatcgtatggcccagtctccccgatcataagaagactctggaacatctttgtaagaaaccaagaaaaaatttaaatgtgagtttcaatcctgaaagtttcctggactgccagattcatagggtggatgacattcaagctagagatgaagtggaaggttttctgcaagatacgtttcctcagcaactagaagaatctgagaagcagaggcttggaggggatgtgcagagccccaactgcccatctgaggatgtagtcatcactccagaaagctttggaagagattcatccctcacatgcctggctgggaatgtcagtgcatgtgacgcccctattctctcctcttccaggtccctagactgcagggagagtggcaagaatgggcctcatgtgtaccaggacctcctgcttagccttgggactacaaacagcacgctgccccctccattttctctccaatctggaatcctgacattgaacccagttgctcagggtcagcccattcttacttccctgggatcaaatcaagaagaagcatatgtcaccatgtccagcttctaccaaaaccagtgaagtgtaagaaacccagactgaacttaccgtgagcgacaaagat

SEQ ID NO: 322 - DNA, 3939 bp, Homo sapiens; identical to SEQ ID NO: 153

SEQ ID NO: 323 - DNA, 4978 bp, Homo sapiens
agctccccggggccccctgcccggccgggcgctgacagcaagggcgggggtccctgccgccgccttgtctcgcgcagggtccggctggggtagcggagcccccagtgcggccatggaccggcccctgtcgtcgtcggcggaggcggaggaggaactggagtggcaagtggcgagtcgcaggaggaaggcctgggccaagtgccgcagctcctggcaagcgtcggagacggaggatctgtccacagaagcgacgacgcaggacgaggaggaggacgaggaggaggacctccccggcgcgcagctgccggcagcggggggaagaggaaacgtgcccaacgagaagatcgcgatatggctcaaggactgccgtacacctttgggagcctcactggatgaacaaagcagtagtacactcaagggtgtgcttgtgagaaatggaggaagttttgaagatgatttgtcattgggagctgaagccaaccacctccatgaaagtgatgctcaaattgaaaactgcaataatatcttggccaaagagagaagattacagtttcatcagaaagggagaagtatgaattccactggatctgggaaaagtagtgggacagtttcaagtgtttcagaattgttggaactttatgaggaagatcctgaagaaattctttataatcttggatttggacgtgatgaaccagatattgcttctaaaattccttccagattttttaattcatcatcctttgccaaagggatagatattaaagtatttttgagtgctcagatgcaacggatggaagtagaaaacccaaattatgctttaacaagccgttttcgtcaaattgaagtgcttactactgtggccaatgcgttttcttctttatattctcaagtctccgggacgcccctgcagagaattggaagtatgtcctcagtgacctctaacaaggagacagacccacctccacctttaactcgaagtaacactgcaaatcgtttaatgaaaacactctcaaaactgaatttatgtgttgataaaacagagaaaggagaaagtagtagtccttctccatcagctgaaaaaggaaagattctaaatgtttcagtgattgaagaaagtggcaataaaaacgatcaaaagtctcaaaaaattatgaagaagaaagagtcatcttctatgttggctacagttaaagaagaagtctctggtagttcagcagctgttacggagaatgctgatagtgatagaatttctgatgaagcaaatagtaattttaaccaaggaactgaaaatgaacaaagtaaagaaactcaaagtcatgagagtaaactgggtgaggaatctggtattgtagaatccaaattagatagtgatttcaacatatccagccacagtgagctggaaaatagcagtgagctgaaaagtgtccatatatccacacctgaaaaagagccttgtgcaccactgacaataccatccataagaaatataatgacacagcagaaggactccttcgaaatggaagaggttcaaagtacggagggagaagctcctcatgttccagccacttaccagctaggtcttacgaagtcgaaaagagatcatctgttacgtactgcaagtcagcattccgatagcagtggttttgctgaagattctacagactgcctatcccttaatcatcttcaggttcaggagtccttgcaggctatggggagtagtgctgatagttgtgacagtgagacaacagttacgtcacttggtgaagaccttgccacaccaacagcacaagaccagccttattttaatgaatcagaggaggagtctcttgtccctcttcagaagggactagagaaggcagcagcagttgcagacaaaagaaaatcaggtagccaggatttccctcagtgcaacaccattgagaatacaggaactaaacagtccacctgtagtccaggggatcatatcattgaaattactgaagtggaagaggatttgtttccagcagagacagtagagctactgagggaagcaagtgctgaaagtgatgtgggtaaaagcagtgaaagtgaatttactcagtataccacacaccatattctgaaatcattggcttctattgaagctaaatgcagtgatatgagctctgaaaatacaactgggcctccctcttccatggacagagttaatacagctttgcaaagagctcaaatgaaggtttgcagtctgtctaatcaaaggatggggcgtagcctgctaaaatcaaaagatttgttaaaacaaaggtacttatttgcaaaagctggctatcctctaagaaggtctcagtctttaccaaccaccttattgagcccagtaagggttgtgtcctctgtcaatgttcgattatctccaggaaaagagaccagatgcagcccaccttccttcacctataagtacacacctgaagaggagcaggaattggaaaagcgggtgatggaacatgatggtcagtctttagttaaatcgaccattttcatctctccatcatctgtgaagaaagaagaagccccccagagtgaggcgccgcgggtggaggaatgccatcatggaaggactcctacctgttcacggcttgctccaccaccaatgtctcagtctacctgttcccttcattccatccactctgagtggcaagaaaggcccctgtgtgagcacacaagaactctgagcactcacagtgttcccaacatatcaggggctacttgtagtgccttcgcttcccctttcgggtgtccttactcacatagacatgccacctacccttaccgagtgtgctctgtgaatcctccttcagccatagaaatgcagttgcgaagagtattacatgatattagaaactcactgcagaatctttcacagtaccctatgatgagaggacctgatcctgctgctgctccatatagtactcagaaatcatctgttctacctctttatgaaaatacttttcaggagctccaggtaatgaggcggagcctgaatttgtttagaacacaaatgatggatttagaattggcaatgctgcgtcagcaaaccatggtttatcatcatatgactgaggaggagaggtttgaagttgatcagctccagggtttgagaaattcagtccgaatggaacttcaggacctggaactgcagctggaggagcgcctgctgggcctggaggaacagcttcgtgctgtgcgcatgccttcacccttccgctcctccgcactcatgggaatgtgtggcagtagaagcgctgataacttgtcatgcccttctccattgaatgtaatggaaccagtcactgaactgatgcaggagcagtcatacctgaagtctgaattgggcctgggacttggagaaatgggatttgaaattcctcctggagaaagctcagaatctgttttttcccaagcaacatcagaatcatcttctgtatgttctggtccctctcatgctaacagaagaactggagtaccttctactgcctcagtgggcaaatccaaaaccccattagtggcaaggaagaaagtgttccgagcatcggtggctctaacgccaacagctccttctagaacaggctctgtgcagacacctccagatttggaaagttctgaggaagttgatgcagctgaaggagccccagaagttgtaggacctaaatctgaagtggaagaagggcatggaaaactcccatcaatgccagctgctgaggaaatgcataaaaatgtggagcaagatgagttgcagcaagtcatacgggaggttggcatggatcctattagctgtgtaatactggaattatcaatgatatgcactggtggaggtgttatttgtgctttagaagatacttgctgttgagctgggctactgtatacagtgtacaatgtgtatttcttcaaccatatattttaaaaagacgtacatagaaacttaggcactttgctatttcttttctaaactatcaaaaactctagcagtttgaaaagcctaatatttatttgtatgtcaatatttttcatttgattccctattagaattaattttaaaacttgaagacttccagacttatccaacttataaataacatatttcttcagactaacatcttaaaacactgacctctatgaggtatttactgtgcaataactgattcatttttttcagagcttgaagcatccaatgatttttccctccactgctgttaattaatgtcacttccaagaagaaaaactgttctgttgtaaaaaatataattgctcttaattcttggggaggttactaatagcagtaggatagaattttatgaggttacctacaactacttaacgtacttacactgtaagccttgttgctttacccaagacaaatgtaattttatcattgcttatgtagtatttttcttttggaaatgtgccttatgttaaacactatgtacttttactttttgcattgtccagacttctttattagatggagatgtttctttttctgtcttctagactaaatagagtatcatccaaataatggggcctatgacttgaatgaatagaaatgaataagctggtgtttgttttttcaaaatggaagtaatttagatttgttctcctcatacataaaatgattttagttcagttttaaccagtgaaaactttgtttttatgaaaaaaaaggaaaatggtttcccatttggttttatatgtgttaaataaatgtgtaaagtaaccaccaaatgttattagaatttttcttctagcatttataattttttcaactcctattgtgtttctttgtgtgtgatattttaatcaaaagtggttgagttgttaacagtgttctttgaaagaatctctaaaaggcttataaatgtttgaaatatcacacaaaggctgatttctaaaatatatatatattaaaacaataaagtatttattttgcccaaaaaaaaaaaaaaaa

SEQ ID NO: 324 - DNA, 3599 bp, Homo sapiens
gggccaaaggagacggggccaggaacaggcagtctcggcccaactgcggacgctccctccaccccctgcgcaaaaagacccaaccggagttgaggcgctgcccctgaaggccccaccttacacttggcgggggccggagccaggctcccaggactgctccagaaccgagggaagctcgggtccctccaagctagccatggtgaggcgccggaggccccggggccccacccccccggcctgaccacactgccctgggtgccctcctccagaagcccgagatgcggggggccgggagacaacactcctggctccccagagaggcgtgggtctggggctgagggccagggcccggatgcccaggttccgggactagggccttggcagccagcgggggtggggaccacgggcacccagagaaggtcctccacacatcccagcgccggctcccggccatggagcccttgaagagcctcttcctcaagagccctctagggtcatggaatggcagtggcagcgggggtggtgggggcggtggaggaggccggcctgaggggtctccaaaggcagcgggttatgccaacccggtgtggacagccctgttcgactacgagcccagtgggcaggatgagctggccctgaggaagggtgaccgtgtggaggtgctgtcccgggatgcagccatctcaggagacgagggctggtgggcgggccaggtgggtggccaggtgggcatcttcccgtccaactatgtgtctcggggtggcggcccgcccccctgcgaggtggccagcttccaggagctgcggctggaggaggtgatcggcattggaggctttggcaaggtgtacaggggcagctggcgaggtgagctggtggctgtgaaggcagctcgccaggaccccgatgaggacatcagtgtgacagccgagagcgttcgccaggaggcccggctcttcgccatgctggcacaccccaacatcattgccctcaaggctgtgtgcctggaggagcccaacctgtgcctggtgatggagtatgcagccggtgggcccctcagccgagctctggccgggcggcgcgtgcctccccatgtgctggtcaactgggctgtgcagattgcccgtgggatgcactacctgcactgcgaggccctggtgcccgtcatccaccgtgatctcaagtccaacaacattttgctgctgcagcacattgagagtgacgacatggagcacaagaccctgaagatcaccgactttggcctggcccgagagtggcacaaaaccacacaaatgagtgccgcgggcacctacgcctggatggctcctgaggttatcaaggcctccaccttctctaagggcagtgacgtctggagttttggggtgctgctgtgggaactgctgaccggggaggtgccataccgtggcattgactgccttgctgtggcctatggcgtagctgttaacaagctcacactgcccatcccatccacctgccccgagcccttcgcacagcttatggccgactgctgggcgcaggacccccaccgcaggcccgacttcgcctccatcctgcagcagttggaggcgctggaggcacaggtcctacgggaaatgccgcgggactccttccattccatgcaggaaggctggaagcgcgagatccagggtctcttcgacgagctgcgagccaaggaaaaggaactactgagccgcgaggaggagctgacgcgagcggcgcgcgagcagcggtcacaggcggagcagctgcggcggcgcgagcacctgctggcccagtgggagctagaggtgttcgagcgcgagctgacgctgctgctgcagcaggtggaccgcgagcgaccgcacgtgcgccgccgccgcgggacattcaagcgcagcaagctccgggcgcgcgacggcggcgagcgtatcagcatgccactcgacttcaagcaccgcatcaccgtgcaggcctcacccggccttgaccggaggagaaacgtcttcgaggtcgggcctggggattcgcccacctttccccggttccgagccatccagttggagcctgcagagccaggccaggcatggggccgccagtccccccgacgtctggaggactcaagcaatggagagcggcgagcatgctgggcttggggtcccagttcccccaagcctggggaagcccagaatgggaggagaaggtcccgcatggacgaagccacatggtacctggattcagatgactcatcccccttaggatctccttccacacccccagcactcaatggtaaccccccgcggcctagcctggagcccgaggagcccaagaggcctgtccccgcagagcgcggtagcagctctgggacgcccaagctgatccagcgggcgctgctgcgcggcaccgccctgctcgcctcgctgggccttggccgcgacctgcagccgccgggaggcccaggacgcgagcgcggggagtccccgacaacaccccccacgccaacgcccgcgccctgcccgaccgagccgcccccttccccgctcatctgcttctcgctcaagacgcccgactccccgcccactcctgcacccctgttgctggacctgggtatccctgtgggccagcggtcagccaagagcccccgacgtgaggaggagccccgcggaggcactgtctcacccccaccggggacatcacgctctgctcctggcaccccaggcaccccacgttcaccacccctgggcctcatcagccgacctcggccctcgccccttcgcagccgcattgatccctggagctttgtgtcagctgggccacggccttctcccctgccatcaccacagcctgcaccccgccgagcaccctggaccttgttcccggactcagaccccttctgggactccccacctgccaaccccttccaggggggcccccaggactgcagggcacagaccaaagacatgggtgcccaggccccgtgggtgccggaagcggggccttgagtgggccaggccactcccccgagctccagctgccttaggaggagtcacagcatacactggaacaggagctgggtcagcctctgcagctgcctcagtttccccagggaccccacccccctttgggggtcaggaacactacactgcacaggaagccttcacactggaagggggacctgcgcccccacatctgaaacctgtaggtccccccagctcacctgccctactggggcccaacactgtacccagctggttgggaggaccagagcctgtctcagggaattgcctgctggggtgatgcagggaggaggggaggtgcagggaagaggggccggcctcagctgtcaccagcacttttgaccaagtcctgctactgcggcccctgccctagggcttagagcatggacctcctgccctgggggtcatctggggccagggctctctggatgccttcctgctgccccagccagggttggagtcttagcctcgggatccagtgaagccagaagccaaataaactcaaaagctgtctccccaaaaaaaaaaaaaaaaaaaaaaaaaaaaaaaaaaaaaaaaaaaaaaaaaaaaaaaaaaaaaaaaaaaaaa

SEQ ID NO: 325 - DNA, 2546 bp, Homo sapiens
tcatgaacttgctgctctcctaccgcgatgtgcaggactactcggccatcattgagctggtggagacgctgcaggccttgcccacctgtgatgtggccgagcagcataatgtctgcttccactacacttttgccctcaaccggaggaacaggcctggggaccgggcgaaggccctgtctgtgctgctgccgctggtacagcttgagggctctgtggcgcccgatctgtactgcatgtgtggccgtatctacaaggacatgttcttcagctcgggtttccaggatgctgggcaccgggagcaggcctatcactggtatcgcaaggcttttgacgtagagcccagccttcactcaggcatcaatgcagctgtgctcctcattgctgccgggcagcactttgaggattccaaagagctccggctaataggcatgaagctgggctgcctgctggcccgcaaaggctgcgtggagaagatgcagtattactgggatgtgggtttctacctgggagcccagatcctcgccaatgaccccacccaggtggtgctggctgcagagcagctgtataagctcaatgcccccatatggtacctggtgtccgtgatggagaccttcctgctctaccagcacttcaggcccacgccagagccccctggagggccaccacgccgtgcccacttctggctccacttcttgctacagtcctgccaaccattcaagacagcctgtgcccagggcgaccagtgcttggtgctggtcctggagatgaacaaggtgctgctgcctgcaaagctcgaggttcggggtactgacccagtaagcacagtgaccctgagcctgctggagcctgagacccaggacattccctccagctggaccttcccagtcgcctccatatgcggagtcagcgcctcaaagcgcgacgagcgctgctgcttcctctatgcactccccccggctcaggacgtccagctgtgcttccccagcgtagggcactgccagtggttctgcggcctgatccaggcctgggtgacgaacccggattccacggcgcccgcggaggaggcggagggcgcgggggagatgttggagtttgattatgagtacacggagacgggcgagcggctggtgctgggcaagggcacgtatggggtggtgtacgcgggccgcgatcgccacacgagggtgcgcatcgccatcaaggagatcccggagcgggacagcaggttctctcagcccctgcatgaagagatcgctcttcacagacgcctgcgccacaagaacatagtgcgctatctgggctcagctagccagggcggctaccttaagatcttcatggaggaagtgcctggaggcagcctgtcctccttgctgcggtcggtgtggggacccctgaaggacaacgagagcaccatcagtttctacacccgccagatcctgcagggacttggctacttgcacgacaaccacatcgtgcacagggacataaaaggggacaatgtgctgatcaacaccttcagtgggctgctcaagatttctgacttcggcacctccaagcggctggcaggcatcacaccttgcactgagaccttcacaggaactctgcagtatatggccccagaaatcattgaccagggcccacgcgggtatgggaaagcagctgacatctggtcactgggctgcactgtcattgagatggccacaggtcgcccccccttccacgagctcgggagcccacaggctgccatgtttcaggtgggtatgtacaaggtccatccgccaatgcccagctctctgtcggccgaggcccaagcctttctcctccgaacttttgagccagacccccgcctccgagccagcgcccagacactgctgggggaccccttcctgcagcctgggaaaaggagccgcagccccagctccccacgacatgctccacggccctcagatgccccttctgccagtcccactccttcagccaactcaaccacccagtctcagacattcccgtgccctcaggcaccctctcagcacccacccagccccccgaagcgctgcctcagttatgggggcaccaaccagctccgggtgcccgaggagcctgcggccgaggagcctgcgtctccggaggagagttcggggctgagcctgctgcaccaggagagcaagcgtcgggccatgctggccgcagtattggagcaggagctgccagcgctggcggagaatctgcaccaggagcagaagcaagagcagggggcccgtctgggcagaaaccatgtggaagagctgctgcgctgcctcggggcacacatccacactcccaaccgccggcagctcgcccaggagctgcgggcgctgcaaggatggatgaatggagaggacaaaggcagcttctgacacaccagccccaggacctggggcgactggaggaagccaggcgagtggggcccaggactggttccagtgagagaaaccaaccacaggcacccaagcactaccagacaaagcgtattaaacagaacacttttgaaaaaaaaaaaaaaaaaa

SEQ ID NO: 326 - DNA, 3757 bp, Homo sapiens
ggaaccgcgaccactggagccttagcgggcgcagcagctggaacgggagtactgcgacgcagcccggagtcggccttgtaggggcgaaggtgcagggagatcgcggcgggcgcagtcttgagcgccggagcgcgtccctgcccttagcggggcttgccccagtcgcaggggcacatccagccgctgcggctgacagcagccgcgcgcgcgggagtctgcggggtcgcggcagccgcacctgcgcgggcgaccagcgcaaggtccccgcccggctgggcgggcagcaagggccggggagagggtgcgggtgcaggcgggggccccacagggccaccttcttgcccggcggctgccgctggaaaatgtctcaggagaggcccacgttctaccggcaggagctgaacaagacaatctgggaggtgcccgagcgttaccagaacctgtctccagtgggctctggcgcctatggctctgtgtgtgctgcttttgacacaaaaacggggttacgtgtggcagtgaagaagctctccagaccatttcagtccatcattcatgcgaaaagaacctacagagaactgcggttacttaaacatatgaaacatgaaaatgtgattggtctgttggacgtttttacacctgcaaggtctctggaggaattcaatgatgtgtatctggtgacccatctcatgggggcagatctgaacaacattgtgaaatgtcagaagcttacagatgaccatgttcagttccttatctaccaaattctccgaggtctaaagtatatacattcagctgacataattcacagggacctaaaacctagtaatctagctgtgaatgaagactgtgagctgaagattctggattttggactggctcggcacacagatgatgaaatgacaggctacgtggccactaggtggtacagggctcctgagatcatgctgaactggatgcattacaaccagacagttgatatttggtcagtgggatgcataatggccgagctgttgactggaagaacattgtttcctggtacagaccatattaaccagcttcagcagattatgcgtctgacaggaacaccccccgcttatctcattaacaggatgccaagccatgaggcaagaaactatattcagtctttgactcagatgccgaagatgaactttgcgaatgtatttattggtgccaatcccctggctgtcgacttgctggagaagatgcttgtattggactcagataagagaattacagcggcccaagcccttgcacatgcctactttgctcagtaccacgatcctgatgatgaaccagtggccgatccttatgatcagtcctttgaaagcagggacctccttatagatgagtggaaaagcctgacctatgatgaagtcatcagctttgtgccaccaccccttgaccaagaagagatggagtcctgagcacctggtttctgttctgttgatcccacttcactgtgaggggaaggccttttcacgggaactctccaaatattattcaagtgcctcttgttgcagagatttcctccatggtggaagggggtgtgcgtgcgtgtgcgtgcgtgttagtgtgtgtgcatgtgtgtgtctgtctttgtgggagggtaagacaatatgaacaaactatgatcacagtgactttacaggaggttgtggatgctccagggcagcctccaccttgctcttctttctgagagttggctcaggcagacaagagctgctgtccttttaggaatatgttcaatgcaaagtaaaaaaatatgaattgtccccaatcccggtcatgcttttgccactttggcttctcctgtgaccccaccttgacggtggggcgtagacttgacaacatcccacagtggcacggagagaaggcccataccttctggttgcttcagacctgacaccgtccctcagtgatacgtacagccaaaaaggaccaactggcttctgtgcactagcctgtgattaacttgcttagtatggttctcagatcttgacagtatatttgaaactgtaaatatgtttgtgccttaaaaggagagaagaaagtgtagatagttaaaagactgcagctgctgaagttctgagccgggcaagtcgagagggctgttggacagctgcttgtgggcccggagtaatcaggcagccttcataggcggtcatgtgtgcatgtgagcacatgcgtatatgtgcgtctctctttctccctcacccccaggtgttgccatttctctgcttacccttcacctttggtgcagaggtttcttgaatatctgccccagtagtcagaagcaggttcttgatgtcatgtacttcctgtgtactctttatttctagcagagtgaggatgtgttttgcacgtcttgctatttgagcatgcacagctgcttgtcctgctctcttcaggaggccctggtgtcaggcaggtttgccagtgaagacttcttgggtagtttagatcccatgtcacctcagctgatattatggcaagtgatatcacctctcttcagcccctagtgctattctgtgttgaacacaattgatacttcaggtgcttttgatgtgaaaatcatgaaaagaggaacaggtggatgtatagcatttttattcatgccatctgttttcaaccaactatttttgaggaattatcatgggaaaagaccagggcttttcccaggaatatcccaaacttcggaaacaagttattctcttcactcccaataactaatgctaagaaatgctgaaaatcaaagtaaaaaattaaagcccataaggccagaaactccttttgctgtctttctctaaatatgattactttaaaataaaaaagtaacaaggtgtcttttccactcctatggaaaagggtcttcttggcagcttaacattgacttcttggtttggggagaaataaattttgtttcagaattttgtatattgtaggaatccctttgagaatgtgattccttttgatggggagaaagggcaaattattttaatattttgtattttcaactttataaagataaaatatcctcaggggtggagaagtgtcgttttcataacttgctgaatttcaggcattttgttctacatgaggactcatatatttaagccttttgtgtaataagaaagtataaagtcacttccagtgttggctgtgtgacagaatcttgtatttgggccaaggtgtttccatttctcaatcagtgcagtgatacatgtactccagagggacagggtggaccccctgagtcaactggagcaagaaggaaggaggcagactgatggcgattccctctcacccgggactctccccctttcaaggaaagtgaacctttaaagtaaaggcctcatctcctttattgcagttcaaatcctcaccatccacagcaagatgaattttatcagccatgtttggttgtaaatgctcgtgtgatttcctacagaaatactgctctgaatattttgtaataaaggtctttgcacatgtgaccacatacgtgttaggaggctgcatgctctggaagcctggactctaagctggagctcttggaagagctcttcggtttctgagcataatgctcccatctcctgatttctctgaacagaaaacaaaagagagaatgagggaaattgctattttatttgtattcatgaacttggctgtaatcagttatgccgtataggatgtcagacaataccactggttaaaataaagcctatttttcaaattt

SEQ ID NO: 327 - DNA, 993 bp, Homo sapiens
gaattcggcacgaggcgccttcttgcccggcggctgctggaaaatgtctcaggagaggcccacgttctaccggcaggagctgaacaagacaatctgggaggtgcccgagcgttaccagaacctgtctccagtgggctctggcgcctatggctctgtgtgtgctgcttttgacacaaaaacggggttacgtgtggcagtgaagaagctctccagaccatttcagtccatcattcatgcgaaaagaacctacagagaactgcggttacttaaacatatgaaacatgaaaatgtgattggtctgttggacgtttttacacctgcaaggtctctggaggaattcaatgatgtgtatctggtgacccatctcatgggggcagatctgaacaacattgtgaaatgtcagaagcttacagatgaccatgttcagttccttatctaccaaattctccgaggtctaaagtatatacattcagctgacataattcacagggacctaaaacctagtaatctagctgtgaatgaagactgtgagctgaagattctggattttggactggctcggcacacagatgatgaaatgacaggctacgtggccactaggtggtacagggctcctgagatcatgctgaactggatgcattacaaccagacagttgatatttggtcagtgggatgcataatggccgagctgttgactggaagaacattgtttcctggtacagaccatattgatcagttgaagctcattttaagactcgttggaaccccaggggctgagcttttgaagaaaatctcctcagagtctgcaagaaactatattcagtctttgactcagatgccgaagatgaactttgcgaatgtatttattggtgccaatcccctgggtaagttgaccatatatcctcacctcatggatattgaattggttatgatataaattggggatttgaagaagagtttctccttttgaccaaataaagtaccattagttga

SEQ ID NO: 328 - DNA, 1155 bp, Homo sapiens
atgagcagaagcaagcgtgacaacaatttttatagtgtagagattggagattctacattcacagtcctgaaacgatatcagaatttaaaacctataggctcaggagctcaaggaatagtatgcgcagcttatgatgccattcttgaaagaaatgttgcaatcaagaagctaagccgaccatttcagaatcagactcatgccaagcgggcctacagagagctagttcttatgaaatgtgttaatcacaaaaatataattggccttttgaatgttttcacaccacagaaatccctagaagaatttcaagatgtttacatagtcatggagctcatggatgcaaatctttgccaagtgattcagatggagctagatcatgaaagaatgtcctaccttctctatcagatgctgtgtggaatcaagcaccttcattctgctggaattattcatcgggacttaaagcccagtaatatagtagtaaaatctgattgcactttgaagattcttgacttcggtctggccaggactgcaggaacgagttttatgatgacgccttatgtagtgactcgctactacagagcacccgaggtcatccttggcatgggctacaaggaaaacgtggatttatggtctgtggggtgcattatgggagaaatggtttgccacaaaatcctctttccaggaagggactatattgatcagtggaataaagttattgaacagcttggaacaccatgtcctgaattcatgaagaaactgcaaccaacagtaaggacttacgttgaaaacagacctaaatatgctggatatagctttgagaaactcttccctgatgtccttttcccagctgactcagaacacaacaaacttaaagccagtcaggcaagggatttgttatccaaaatgctggtaatagatgcatctaaaaggatctctgtagatgaagctctccaacacccgtacatcaatgtctggtatgatccttctgaagcagaagctccaccaccaaagatccctgacaagcagttagatgaaagggaacacacaatagaagagtggaaagaattgatatataaggaagttatggacttggaggagagaaccaagaatggagttatacgggggcagccctctcctttagcacaggtgcagcagttg

SEQ ID NO: 329 - DNA, 2678 bp, Homo sapiens
atgcgacccgaccgcgctgaggctccaggaccgcccgccatggctgcaggaggtcccggcgcggggtctgcggccccggtctcctccacatcctcccttcccctggctgctctcaacatgcgagtgcggcgccgcctgtctctgttcttgaacgtgcggacacaggtggcggccgactggaccgcgctggcggaggagatggactttgagtacttggagatccggcaactggagacacaagcggaccccactggcaggctgctggacgcctggcagggacgccctggcgcctctgtaggccgactgctcgagctgcttaccaagctgggccgcgacgacgtgctgctggagctgggacccagcattgaggaggattgccaaaagtatatcttgaagcagcagcaggaggaggctgagaagcctttacaggtggccgctgtagacagcagtgtcccacggacagcagagctggcgggcatcaccacacttgatgaccccctggggcatatgcctgagcgtttcgatgccttcatctgctattgccccagcgacatccagtttgtgcaggagatgatccggcaactggaacagacaaactatcgactgaagttgtgtgtgtctgaccgcgatgtcctgcctggcacctgtgtctggtctattgctagtgagctcatcgaaaagaggtgccgccggatggtggtggttgtctctgatgattacctgcagagcaaggaatgtgacttccagaccaaatttgcactcagcctctctccaggtgcccatcagaagcgactgatccccatcaagtacaaggcaatgaagaaagagttccccagcatcctgaggttcatcactgtctgcgactacaccaacccctgcaccaaatcttggttctggactcgccttgccaaggccttgtccctgccctgaagactgttctgaggccctgggtgtgtgtgtatctgtctgcctgtccatgtacttctgccctgcctcctcctttcgttgtaggaggaatctgtgctctacttacctctcaattcctggagatgccaacttcacagacacgtctgcagcagctggacatcacatttcatgtcctgcatggaaccagtggctgtgagtggcatgtccacttgctggattatcagccaggacactatagaacaggaccagctgagactaagaaggaccagcagagccagctcagctctgagccattcacacatcttcaccctcagtttcctcacttgaggagtgggatggggagaacagagagtagctgtgtttgaatccctgtaggaaatggtgaagcatagctctgggtctcctgggggagaccaggcttggctgcgggagagctggctgttgctggactacatgctggccactgctgtgaccacgacactgctggggcagcttcttccacagtgatgcctactgatgcttcagtgcctctgcacaccgcccattccacttcctccttccccacagggcaggtggggaagcagtttggcccagcccaaggagaccccatcttgagccttatttcctaatgggtccacctctcatctgcatctttcacacctcccagcttctgcccaaccttcagcagtgacaagtccccaagagactcgcctgagcagcttgggctgcttttcatttccacctgtcaggatgcctgtggtcatgctctcagctccacctggcatgagaagggatcctggcctctggcatattcatcaagtatgagttctggggatgagtcactgtaatgatgtgagcagggagccttcctccctgggccacctgcagagagctttcccaccaactttgtaccttgattgccttacaaagttatttgtttacaaacagcgaccatataaaagcctcctgccccaaagcttgtgggcacatgggcacatacagactcacatacagacacacacatatatgtacagacatgtactctcacacacacaggcaccagcatacacacgtttttctaggtacagctcccaggaacagctaggtgggaaagtcccatcactgagggagcctaaccatgtccctgaacaaaaattgggcactcatctattccttttctcttgtgtccctactcattgaaaccaaactctggaaaggacccaatgtaccagtatttatacctctaatgaagcacagagagaggaagagagctgcttaaactcacacaacaatgaactgcagacacagctgttctctccctctctccttcccagagcaatttatactttaccctcaggctgtcctctggggagaaggtgccatggtcttaggtgtctgtgccccaggacagaccctaggaccctaaatccaatagaaaatgcatatctttgctccactttcagccaggctggagcaaggtaccttttcttaggatcttgggagggaatggatgcccctctctgcatgatcttgttgaggcatttagctgccatgcacctgtccccctttaatactgggcattttaaagccatctcaagaggcatcttctacatgttttgtacgcattaaaataatttcaaagatatctgagaaaagccgatatttgccattcttcctatatcctggaatatatcttgcatcctgagtttataataataaataatattctaccttggaaaaaaaaaaaaaaa

SEQ ID NO: 330 - DNA, 2407 bp, Homo sapiens
gagcgccgcacctacaccagccaacccagatcccgaggtccgacagcgcccggcccagatccccacgcctgccaggagcaagccgagagccagccggccggcgcactccgactccgagcagtctctgtccttcgacccgagccccgcgccctttccgggacccctgccccgcgggcagcgctgccaacctgccggccatggagaccccgtcccagcggcgcgccacccgcagcggggcgcaggccagctccactccgctgtcgcccacccgcatcacccggctgcaggagaaggaggacctgcaggagctcaatgatcgcttggcggtctacatcgaccgtgtgcgctcgctggaaacggagaacgcagggctgcgccttcgcatcaccgagtctgaagaggtggtcagccgcgaggtgtccggcatcaaggccgcctacgaggccgagctcggggatgcccgcaagacccttgactcagtagccaaggagcgcgcccgcctgcagctggagctgagcaaagtgcgtgaggagtttaaggagctgaaagcgcgcaataccaagaaggagggtgacctgatagctgctcaggctcggctgaaggacctggaggctctgctgaactccaaggaggccgcactgagcactgctctcagtgagaagcgcacgctggagggcgagctgcatgatctgcggggccaggtggccaagcttgaggcagccctaggtgaggccaagaagcaacttcaggatgagatgctgcggcgggtggatgctgagaacaggctgcagaccatgaaggaggaactggacttccagaagaacatctacagtgaggagctgcgtgagaccaagcgccgtcatgagacccgactggtggagattgacaatgggaagcagcgtgagtttgagagccggctggcggatgcgctgcaggaactgcgggcccagcatgaggaccaggtggagcagtataagaaggagctggagaagacttattctgccaagctggacaatgccaggcagtctgctgagaggaacagcaacctggtgggggctgcccacgaggagctgcagcagtcgcgcatccgcatcgacagcctctctgcccagctcagccagctccagaagcagctggcagccaaggaggcgaagcttcgagacctggaggactcactggcccgtgagcgggacaccagccggcggctgctggcggaaaaggagcgggagatggccgagatgcgggcaaggatgcagcagcagctggacgagtaccaggagcttctggacatcaagctggccctggacatggagatccacgcctaccgcaagctcttggagggcgaggaggagaggctacgcctgtcccccagccctacctcgcagcgcagccgtggccgtgcttcctctcactcatcccagacacagggtgggggcagcgtcaccaaaaagcgcaaactggagtccactgagagccgcagcagcttctcacagcacgcacgcactagcgggcgcgtggccgtggaggaggtggatgaggagggcaagtttgtccggctgcgcaacaagtccaatgaggaccagtccatgggcaattggcagatcaagcgccagaatggagatgatcccttgctgacttaccggttcccaccaaagttcaccctgaaggctgggcaggtggtgacgatctgggctgcaggagctggggccacccacagcccccctaccgacctggtgtggaaggcacagaacacctggggctgcgggaacagcctgcgtacggctctcatcaactccactggggaagaagtggccatgcgcaagctggtgcgctcagtgactgtggttgaggacgacgaggatgaggatggagatgacctgctccatcaccaccacggctcccactgcagcagctcgggggaccccgctgagtacaacctgcgctcgcgcaccgtgctgtgcgggacctgcgggcagcctgccgacaaggcatctgccagcggctcaggagcccaggtgggcggacccatctcctctggctcttctgcctccagtgtcacggtcactcgcagctaccgcagtgtggggggcagtgggggtggcagcttcggggacaatctggtcacccgctcctacctcctgggcaactccagcccccgaacccagagcccccagaactgcagcatcatgtaatctgggacctgccaggcaggggtgggggtggaggcttcctgcgtcctcctcacctcatgcccaccccctgccctgcacgtcatgggagggggcttgaagccaaagaaaaataaccctttggtttttttcttctgtatttttttttctaagagaagttattttctacagtggttttatactgaaggaaaaacacaagcaaaaaaaaaaaaaaaaaa

SEQ ID NO: 331 - DNA, 3037 bp, Homo sapiens
agttcctctcccgccgcgccgggccgcgctgccgctcgctccccggccgtggcgcctccgggccagacgcgctgcagcctccagcccgcggcaagcggggcggccgcgccacccccggccccgcgccagcagcccctcgccgcgcgtccagcgttcccggccagcagcctccccatacgcaggtcctgctgggccgccccgtcgcgccccccactctgaactcaagtcaccgtggagctccgccgccccgaaactttcaccgcgagcgggaaatatgggatgtataaaatcaaaagggaaagacagcttgagtgacgatggagtagatttgaagactcaaccagttccagaatctcagcttttacctggacagaggtttcaaactaaagatccagaggaacaaggagacattgtggtagccttgtacccctatgatggcatccacccggacgacttgtctttcaagaaaggagagaagatgaaagtcctggaggagcatggagaatggtggaaagcaaagtcccttttaacaaaaaaagaaggcttcatccccagcaactatgtggccaaactcaacaccttagaaacagaagagtggtttttcaaggatataaccaggaaggacgcagaaaggcagcttttggcaccaggaaatagcgctggagctttccttattagagaaagtgaaacattaaaaggaagcttctctctgtctgtcagagactttgaccctgtgcatggtgatgttattaagcactacaaaattagaagtctggataatgggggctattacatctctccacgaatcacttttccctgtatcagcgacatgattaaacattaccaaaagcaggcagatggcttgtgcagaagattggagaaggcttgtattagtcccaagccacagaagccatgggataaagatgcctgggagatcccccgggagtccatcaagttggtgaaaaggcttggcgctgggcagtttggggaagtctggatgggttactataacaacagtaccaaggtggctgtgaaaaccctgaagccaggaactatgtctgtgcaagccttcctggaagaagccaacctcatgaagaccctgcagcatgacaagctcgtgaggctctacgctgtggtcaccagggaggagcccatttacatcatcaccgagtacatggccaagggcagtttgctggatttcctgaagagcgatgaaggtggcaaagtgctgcttccaaagctcattgacttttctgctcagattgcagagggaatggcatacatcgagcggaagaactacattcaccgggacctgcgagcagctaatgttctggtctccgagtcactcatgtgcaaaattgcagattttggccttgctagagtaattgaagataatgagtacacagcaagggaaggtgctaagttccctattaagtggacggctccagaagcaatcaactttggatgtttcactattaagtctgatgtgtggtcctttggaatcctcctatacgaaattgtcacctatgggaaaattccctacccagggagaactaatgccgacgtgatgaccgccctgtcccagggctacaggatgccccgtgtggagaactgcccagatgagctctatgacattatgaaaatgtgctggaaagaaaaggcagaagagagaccaacgtttgactacttacagagcgtcctggatgatttctacacagccacggaagggcaataccagcagcagccttagagcacagggagacccgtccatttggcaggggtggctgcctcatttagagaggaaaagtaaccatcactggttgcacttatgatttcatgtgcggggatcatctgccgtgcctggatcctgaaatagaggctaaattactcaggaagaacaccctctaaatgggaaagtattctgtactcttagatggattctccactcagttgcaacttggacttgtcctcagcagctggtaatcttgctctgcttgacaacatctgagtgcagccgtttgagaagaaaacatctattctctccaaaaatgcacccaactagctctatgtttacaaatggacataggactcaaagtttcagagaccattgcaatgaatccccaataattgcagaactaaactcatttataaagctaaaataaccggatatatacatagcatgacatttctttgtgctttggcttacttgtttaaaaaaaaaaaaaaactaatccaacctgttagattttgcaggtgaagtcagcagcttaaaaatgtctttcccagatttcaatgatttttttccccctacctcccaaaatctgagactgttaaaacatttttcttctatgaacactgctcagacctgctagacatgccataggagtggcgtgcacatctctctctcttccagcaggaggagcccgtgagcacgcacagctgccctgtctgctcacccgaaggcaccgggctcacctggacctcccaggaaagggagaagagcctcagaaactgctctgtgtttagaaggaatatttttaagagtccagctttttcatttccacaatttcctatatccagatttgttttgacaatgtagtttggaagaactaagattctaatctctgaagaaccttatagggccttctaaaacataagagtttcctttgttgcttcaaatatttgaacattatgttaaagatcaagtattaattttagttgtactctagaaagctaaagtgccacattcggggctatttttatgattcagcaatcttttctaaattgtgtagcatgtgtatgagactatttatacccaaggatatgaaggaacataagtgactacaaggctctaataagccacggtggcaggaggttcaagcggttctgttcactaaatttttctcctgtaagctttgaatggaaacttctgtatcacatgatgtgtttcacttatgctgttgtgtatatacctaatatttctatttttgattttattttaatacacctcgtccaataacgaaaaaaaaaaaaaaaa

SEQ ID NO: 332 - DNA, 2822 bp, Homo sapiens
ccacgcgtccggactagttctagatcgccgctgtcctttccatctccttcgcccaccccttggccttcctcacgctcctgcccacctccatcagccagttcttctccggagctgtcctgggttctgaaatgttcgtcatcctcatgctctacctctggttcgccatcggcctggcctgcgccggcttctgctgccaccagctgctgttgatcctccgcgggcagacccgccaccaggtgcggaagggggtggcagtgagggcccggccctggcgcaagaacttacaagaggtcttcggaaagaggtggctgctgggcctgctggtccccatgttcaatgtcggaagtgagagctccaagcagcaggataagtagtagacactcccgtcatttatctctctgtctctgtcttgactcctcctgagcataaaaccatggcagccttgtctccacccatgactcactacaaccttgtgctggtaaggtcctagcatcttcccctcaccttccacccatgagaacagcgtgagctggtggatcatgacaaggaggaaaaatgtccccccaggcatttctaggctcctcacgagccagccaggtggctgctagctgttaggctgcctctgctttctttccgtccccttgggatccctgctttccccctcttcctggctcatccattctccaccgtgtctcattcatcactgctgtctgctagagcccttcctctcagcccccatgttgggagaggggagtggattcttgctgctggtatgagactccctgggacctagaggctggcaaatgtttaaaatcaccacgtgtaagaggcagccaagtcagctctgccaactgctaggggagttgggaaagagtgggtgtgtgtccgcatcccctctgtaggaaaaagaacttagtagcttgctgctccctcaccaccccccaccaggttcaagaccctttttctgggagacagcaatcaatggcctgctttttccaaatgttattccctgtccgccctgccccatctggccggcccagcccagtccaggacctggctggatgcttcctgtccctggaactcttccagcctttctacttgatctccagcccccaggtctttgccagatgatgggaaggcaaggaagaagggacagggaaagataattactgataaatgaaggggatattcgactgtataaccatatggaagtgtgtgtgtgtgtgtgtgtgtgtgtgagagagagagagagagagagagagagagagatgggtggtggtgagaagtgttgttagaaacatataggaataatgcctaggggaaagggagaagtgagagggacaattgggttcatttatgccctatacaaagggcattccagcagctgaaactcttcaatgtttgaatggctgcctgtgaaggtagtgagtgccccatcactggaggtattccagcagagtctaggcagtcgtctgccaggcatgctgtggaagggatttctgtacagggtcattctaggtgagcttacacattccttccaaccccaaggttctgatgtcctggttgtgattgctggacccagaggcaagatctgcagagatgcctgtgagatatttgctttcctagaggggagtgtgggcatgggaggggtctgaaaatcaggacccaacccagccactgaagagagagtctctgcagagacagggctacctgggtggttgaggggactgacatttgaggacagggagatggagcagtgtcattgtcagtggcagggcatggggggcagtggtgagctaaggctgaggagtggagatgaccagaatataagggtgcaattcccagaccatccctgcgcatctgactgactccggtggaggcactgctgtgtgttttctgaaacctagaggaccagacccctggggcatataagggagtagggacaacacaagtgccccctcctgactgggtcccaaagccaatatgacatccatgcaggcagcagtgctgaatccatgccctgcaatgtccaaccgccaactgcagtgacccgctgatagctgcgcaacagcctgggttcttgagcagagattgggaggactttactgtggttctgccttcacaccccctagagagctaatgtagtattggctccacctgctcacatttctccctcccatactcattccctcactcatccatcctacgtatatttattgagtgccaactacgttcccagcctcttccaggcactggcaatgcagtgatgaacaggatgacaagattcatgccatcaggggcaccttgtcactgccgtctgtgcactgattcacactccctgcaaaatggtcactctgccatcttggtggttggtggggcaggtcatttggaaataaagaatgtgatagagatggctgaagaggggaagcctaggctgcctcaatggaggagtcgctgggggcattttcacccacaattctggccatacttaagcaatgggagggagagggaggaggggaagatctgggcaattttggccttgactctttcctggctccagagctcaagcttagaagccagccctgctatttccagcctcctgaaggctcagcacggtgaggcctgacatcctggggaagggcaacagggagacctacaggatgttggctgcttgcagactggtcaatgggggatgacggtggggaggttgccagatgtgagacttgagtagcatttgtacacatggccctgtattgtccttgaagaacatcaataaaatatatggttttaaattggaaaaaaaaaaaaaaaaaaaaaaaaaa

SEQ ID NO: 333 - DNA, 31737 bp, Homo sapiens
aagcttttatgagaagaatgttgacctctgtccagaccaaacaagatgaagaagtcttattttaacatttgagaaatatcagttgggcatcagataacattcctgaaagggactgaaaacaatgcagtatactacaaaagaagctgcatatccttaggaagaaaagaaactatttgtcatagatggcttgtccacatgcgcaaagcagagagcaacctaagatggtgccgtccagttccaggtgcactgtgattactatctgaatgccattactatttaaattgcattttttttttgagacagggtctccttctgtcacccaggctggagtgcagtgaggtggtcttggctcactgcagcctcaacctcctgggctcaagcaatcctcccacctgagccttccaagtgcctgggactacagccacgcgccgctacacccagctattttttttgtatttttggtagagacagggttttgccattttggccaagctggtctcaaattcctgacctcaagtgatccccccgtcttggcctcccaaagtactgggattataggtaggagccaccatacccagccttaaatttcatcttttaaaagagaaagagagcttagaatcttaatcagttacctgaggccctttatcctgcaatattctgaattgggatgttcctattttacatattaaaaaatgtaaaactgatttatatggtagataaccctacagttcagggctagaactttagattaaatgcattcataccctggcagatgtggtagcttgcctccaagatggcacccaatgaatgatccctgtaccaggattggtctatgtgaccaaaagcatacagcattagtgatgatacttatatcacttgggtaattacattataaaagatgtccatcatgggtgttcttttccctttctcttgctcagagacaagcaagctgtcatgttataagcagccctttgaggggtccatgtgatgtcaaggaatgaagtctctagccaacatttaatgaggaactgaggcccaccaacaaccttgagtgagcttggaagtagctccttcagcatcagttgggtgtcgagatgactactgacagcttgactgcaacttcatgagagtcttctggaccagaaccactcagttaagtggctcccagattcctgatcctcagaaactctgagaaataatgaatgttggttgttttaaaatggtaaattttgaggtattatgttatgtggcaatagatagctaatatataaattatttgaatcaaacaatacgttaaattaaagctcagaagaataaacatctgtaattccttaatttgttttcccttctattctacagaatagaattttacagatgaaccttgtagttacttgtgcaataagagacagtatgttgtattgattaagtgcagagcctctggatgtatgatagaagaaagaccaatattcaattgctttcttcttcaattccaagcttgtgagcttgagcaaattttaaaagtgttttaagcctcagtttcctgggatggtagtgcttagctcgagctcctagcatatattaactacaaactaaatattagctataattattagttttactttgattattgactctaaataaataccttaagaactttgtgttctccacagatttggatatgtctggacgttatgtaggctggagtagtcagcaattacttgcctgaggaagggaaggcctcctcctttaagaaaagaataggctgggtgcggtggctcatacttgtaatcccagcattttgggaggctgaggagggtggatcacctgaggtcaggagtttgagaccagcctaaggaacatggtgaaaccctgtctctactaaaaatacaaaaattagccaattgtggcacgcgcctgtagtcccggctactcaggaggctgaggtgagaggattgcctgagcctgggaggtggaggttgcagtgagccgagatcgcgccactgcactccagcctgggcaacagagtaagactccgtctcaaaaaaaaaaaaaagaaagaaagaaaagagtagaaggcccaagcttagtccaatattatagcttcagcatcagagtagagaatgattcagagcatctgtccagtgtctgctgtagatccctcaaatccgtgtttggacgcttctggtaaggggtgtatggcagatgcacccgacagatgcacttggcagcaataacttatgcatacctgaagaatgaccctatggtctaagaagaatgtgtgttcagagctccaagctaaggaatctgggagtggccaacccagatatttcatttcttatctatgacgaacttctgaactgctcccacccccagcccatcctgtagaatgcaggccctacgaggcgatcaaagccctttgttttaggttaaatgaaggttgcctggtggaggttgctaggggaaaggtgttaagtaaaaatgttatataaactgcatggtgttttttgtttgtttttgtttttttgagacagagtttttgctcttgttgcccaggctggagtgcaatggtgcaatctcggctcactgcaacctccgcctcctgggttcaagtgattctgctgtctcagcctcccaagtagctgggattacaggtgcccaccaccaggcccggctaattttttgtatttagtagagtcagggtttccccatgttggtcagcctggtctcaaactcctgacttcaggtgatccacctgcctcagcctcccaaagcgctgggattacaggtatgagccaccacgcctggccaattgcatgctttttacaaggagttttggttctcctgcccagcccactgccactggactgccctgtattgtaagtcccctcaataaaccttatgtctcagtttctggttctaggtctcttcttcagcctcttgaacatggtgccatccctactgaagtcaatggggtctgacatgactaggggaacttgaacaaaatctgaaatagctgtttttttcttgccaaaatcactgtaagacattatttgcctcagccccagaacattgaattatatgacccaagagtggagaaacagagaagtctgtctgtgtcatcagacaatatcccaagtgggatgtcatcaccccaatgcatattggcatttgggcagagtagagcagcgtcagcctagcaagacttggcacaattctgttggattgcacaatagaatgagaaatcacatttctgctgttatgtgattctgcattttaactccagtttgtttggcctggacagacaggtaactagccatgaagacaatggaccttgaaacattctgaagactagaaaaagtatgtaataaaatactttgaacaactgtttaaggacttaaatgtccagactgtttctttagatgagtgtaatttccaatgtgaaaccccacaattcggcttcaagaggtacaggacagtttttgaattccacagaaaaaattttgcattgcaacaaacttgaccatcctatttgtggtagtagaaatgtaaattcattcccctcagagatacctgcaaaaatgaaatgtgaaatattctgcttgcattttaaagactggttattgcattctagaatagatggaaaagacattagtgagggccaatatagaaatatgagttttcccaaaagacttttatgtatatatatgacatggcaggaaaattgggtcactagtggtttttacttcttcgttcatttggcaaacatatgaatagactgatgtgtgccaaacactgttccgagttctgggaactgaggaaagaaacaagctatctgttttcatggagctcgtattttacttggaggatggagaggctgacaataaacttgtacaaataaatacaaacttcaagtagtggtaattgccaaggtgaaagaaaagagagtaatggtatagaatgacagtcattgggtagctgctttagatgaatggtaagtgaacatgtttctgagaaagtgatatctgagctgagaggcaaaggacgagaaggaatctgtcatgtgaagatctgggaagcaggtgtactaagcagaagagcagcaagtacaaagactgtgaggtaagggatgtgctcggggtgactaagtaacggagagaagaccagcgtgactagaacatagtgatcaaagtgagtaatgttggaacataagtcagagacattggcaggaggccagtttttatggaagccaaattgtctagtgccttgtagatagtggcaaggagtttggattttattctagatggaacactatcagaatattttttcttttttgagacagggtctcactgtcacccaggctggagtgcagtggcatgatcttgactctctgcaacttctgcctcctgggcttaagtgatcctcacacctcatcttccccagaagctaggactacacgcaccacacctggctaatttttgtattttttgtagagatgggattttgccatgttgcccaggctggtcttgaatgctgcccactttggcctcccaaagtgctaggattataggtgtgggccaccgtgcctggcctatcagagtattttcaggcagagaaaagcataaggtcttacttctagcataaaaggaacattctggctgctatatagagaagggactgtagaggacaagaatgaaagcaggttgactgattagaaagcattgcagcattataggcaagagcttatgatggcctgaactagagtggtaactgtggaagagataaatggatgaattcagaatatttttggaggaaaaaggtgacatgatttactattggatgtgggcatgagggaaggaaattaaggatgactcctggatttttagcctgagcaactttatagcttttcatgtttgtttttgaaatggggagatttgatggggtgggggtttgggaaattaagagttttttatttttattttttgctttttaaaaattgtggtgaaatacacataacataaaatttaccattttaaccactcttaagggcattaagtacattcacattgtgcaaccatcaccatcatccatctgtagagaactcttttcatcttgcaaaattgaaactctgtacctattaaacactaactccccactcccctccttaccctagccccgaaaacccttctataatacagaagtctctatgaatttgaccactctcataagtggaatcacatagtatttgtccttttgtgactcgcttttattgtcacttagcataatgtcttcaaggttcatccatgttgtagcatatgtcagaatttccttcctttttaagactgaataatatgccattatatatgtatactacattttgtttacccattcatccactgatggacacttgggttgcttccatcttttgcctgttgtgactaatgctgctgtgaacatgtatgtacaagtatctatttgagtacttgcttttaattctttgggtatatacccagaagtggaattgctggatcatgtggtaattctatgtttaatttttttaaggaattgccatactgttttccccggtagctgtaccattttacattcccaccaacagtgcacaagagttccagtttctccacgtcctcgccaatacttgttattttctgtggttttgctgttgttgttgttttgtttgtttttgtttttttacagaagctatcctaatgggtataaagtggtatttcattgtggttttatttgcatttccctaattattaattatgttgagcatcttttcatgtgcttattggcaatttatatattttctttggagaaatgtctactcaactcttttgcccattttaaaatcaggttttttttttgttgttgttgaattgtaggagttctttacatatttgggatatgaaccacttatcagatacatgatttgcaaatattttctcccattctatgccttttcactattgattatatccttttacgcacagaagttttacatttttgatgtagcccaatttttctattttttcttttgttgcctgtgcaagagttttattttaaatgcaattttgggatgtctattagacatccaagtcaaaatgtcaaatagacggctggatatatgagtctgaaggtcataaaagagatcagaatgagatataaattagggaatcattcacatatagatggtatttaaggccatgggtctggacagaatcacccaggagagaagtcatataggaacacataggtttccctagggaatacagtcatcttagagtaaaattccatcgaaggagatcaggaggtcttggctgagttaaatttggataatataagttattaactatgttaatgtgttctaagctagatgccaggttaaggcagaaattaggaggtcctgggcaagtatcaatttgctctgctattgtattattacaagaataatactaacaatagtacatgacctcatttcatcctcacaatagctttacgcgattgatattcttgtcttcactttacaggcaaagaaacaaaagagaagtaaagtaatttacccagttgctatagttagcatgtggtaggtccatattagaggtctggtctgtctgcatgatggttaattttatgagatagcaagtaaaacattatttgtgtctgtgtctgtgtctgtgaggatgtgttcggagaggttcacaagcatttgaatcagtagacggagcaaataaggtccgccctcaccaatgtgggcaggcatcatccaattcactgaggactcctgctcacacagaacaaaaagtcagaggatgtgcctatagttccagcttcttggaaggctgcggcaggaagatgctggggcccaggagtttgaggccagccagggcaacatagcaagacctttctctttaaaaaaattttttttggctgggtgcagtggctcatgcctgtaatcccagcactttgggaggccgaggcaggcggatcatgaggtcaggagatcgagaccatcctggctaacatggtgaaaccccgtctctaccaaaaatacaaaaaattagccgggcgttgtggtgggcacctgtagtacccgctactcaggaggctgaggcaggagaatggagtgaaccccggaggcggaggttgcaatgagtggagattgcaccactgcactccagcctgggcgacagatcaagactccgtctcaaaaaaaaaaaaatttttttttaaggcataggaagggcaaattctctcattctctctcttcttgagctgggacatccattttctcctgccttcaggaaatcagagctccatgttcttggatctcccgactctgggacttacaccttacccttttcccctcagtctttcagacttggactgaattacaccatcacctttcctggttctccagcttgcagatagcatgtcatgggacttcttagcctctgtaatcatatgagccagttcatatagtaaatctcctcctattgatctatacctatatctgtaatcctattagttgggtttctttggaaaactctaatacccccttatccacagtttttttttttttctgcagtttcagtatctacggccaactgggtaaaccaaataggtgagtacagtacaataaaatattttgagagagagatgcacatttgcatgacttctattacagcatattgttataatcattctattttattagctattgttagtctcttattctgcataatttataaattaaattttatcttaggtacgtatgtatgtatgtataggaaaaaacctagtatatatagtgttcagtactatctgaggtttcaggaatcccctggtgttcttggattgtagccccctgccttcaagcctgcactctcaattactgatgctacatctcattaccctgaaagatgaaatctagccttgagcccttaccaactggctgcattagatcattttagatctccatgtcaccgcagtcacatttgtgtgtggtgaatggtccaggagagatggtgctattcctgccaccttcattagcctggcttgcattctcttctgaacacttgggtcttattaacactgtgccaggttctcatataccccaaataaagaaaaagaaagtagatggatacagtgtacatactaggcccaacagaagttatgcttttactccctttcctcttcaatttagatactactatggccctttgcttccgtctatctcagttccttcgttgtcttatcattccattcacctctactgcaaggccctaaatccaaccatttggtcactgtactcctaccctgggtcactggaggaaatcacacaaccatgtgagttggtgtcttgacacatttacatttccaatcacaattggaccctcagcccacttgttactctctcaacccatgtttccttgcacccatcaacagccccccttctttcttgtatcttaagtcagcatcctggattgagagtgaagagtaaaatggtttgacttattgtgagcttagcctttgcaagactagtaaacaaaaggactggggtagtggcaagagtatgaatgggctggagggatcacaaggtataaactgaaagggaaaggaaatgatatcaggtgagagctgaagagttgggaggaaaacaaaggtcctagagtgagatggagctgttgtgactgatgagaggcccagggtgtgtcctcagcagcaagagtgtgaagtataggtgaaggtcaagtactgcgaggctaaggtgtagcactactcatcttcctgagcacaaaagtcaccagcaccttgggctgggtgtcagagagctcacagaatgtggataaccaaccaggcagatgttggtaacagcaaccaggagggcacagcacaaacctgagcaggtcttttatgtatgtgaaggtgaaggagttatgatttagaaatggcagtgggaagcaaggagaatgctgagagcctgctcagctcttgtcttccaggatcatggatagtgcaaaatgagtagccttcctttgagagacagagccatgaggctagtggagtgctcagaaagaagccagatctctatcaaggaaaggagatggagagaacaaccagggatgtacttgaaagaggagagttgcatgtctacaatggaatatgtgttgcagaggactcagtcacagagaagacaactgcaggagggtgagctggagggctctgcaggggcaggagcacagtagggcattagaatgggagttttagatgagaaggattacatttgcagtgctggaggaagatcatctcaaggttcacaaaatcaagctttaaacttgtctgtgtcaacagacggaggcattgggtgatagttcaaatccccataattttttataatcctttcagcagtctgttaaatataaccttggtgataagctaagttacctcagcatagcaagcttggcttggtctaaatcagggtagaggtgattgctgctcaaaggaagtgagagagacacccagctctggattggagaacatgactttgacctgggtttcagcctccacagggctaagccccaggggagcactgggcaagttgctaaggccacaagcaggagtttataaccaggctagactaagcccactgatgcaagaattttttttttttttttttgagacagagtctcactctgtcacccgggctagagtgcagtggtgtgatcttggctcactgcaacctccgcttccctggttcaagtgattctcctgcctcagcctctcaagtagctgggattacaggcacccgctaccatgcctggctaaattttgtatttttttagtagagacagggtttcaccgtgttggccaggatggtcttgagctcctgacctcaagtgatccacctgccttggcctcccaaagggctgggattactggcttgagccaccatgcccagcctgatgcatgaatttgcattcttcatgctcttcatctatgcttctgaagacctggcacttagtcaacactcagtaagtttttattttttaactgctttatgattataaaagtaatatatgaagcatttgtaaagtatggaaatctggaaaaaataaaacagaagtcatctataatctgaccatccaaacatacctactgttaataccttagtctacgttctttctttttttcctttttttgagatggagtcttgctgtgttgcccaggctggagtacaatggcatgatttcggctcactgcaacctctgcctcccaggttcaagcagttctcctgcctcagcctcccaagtagctgggcttacaggcatccaccaccatgccctggtaatttttgtatttttagtagagatggggtttcgccatgttggccaggctggtctcaaactcctgacctcatgtgatctgcccgcctcagccttccaaagtgctaggattacaggtgtgagccaatgcgcctggcctttttttttttttaagacagttttgctctttttgcccaggctgtagtgcagtggtgtgatcttggctcactgcaaccaggttcaagtgattttcctgcctcagccttctgagtagctgggactacagacgccaccatgcccagctaatttttttgtatttttagtagagatgggggtttcaccatattggccaggttggtctccaactcctgactttgggtgatccgcccacgttggcctcccaaagtgttgggattacaggcatgaaccactgtgcccagctgagcctactttcttctggtctttttctcatgcctccccaccaccaccccagccccccgccattacatacgtatatatgtttattttttttttaaagagatgaagtcttgctctgttgcccaggctggtaggctgatctcaaactcctggcttcaggtgatcctcctgtgttggcctcccaaagtgctgttgttacaggcataagccatcacacctggctatttttcacgctttaaaaactcactttattcattcatttattcactcattctttgattaacactcatatactggttttattttattattttatatttttagctacagggtctcactctgtgcccgaggctggagtgcagtggcatgatcatgactctgcaaccccgaactcctgggctcaagggatcctcccaactcagcctcccaagaagttaggattacaggcacatgctaccacaccctgctaatttttttaaattaatttttttcttccttttttttttttttttttttttgtagaaccagtgtgtgttaggccattcttgcattactataaagaaatacctgagactgggtaatttattaagaaaagaggtttaattgactcacgatttcacaggctgtataggaagtgtggcactaggcatctgctcagcttctagggaggcctcagggagcttttactcacagtggaaggtgaagggggagcaggtgtgtcacatggtaaagacaggagcaaggtggggggaggtgccacacccttaaacaaccagatttctcaagaactcacttattatggtggggacagctccaagccatgagggatctgcccccatgaccaaaacacctcccagcaggccccacctccaacattagagattacatttccacatgcgatttggacagggataaatatccagactatgtcattttgcccctggccctcctaaatctcatgtccttctcaagttgcaaaatacaatcatgccttcccaagagttccccaaagtcttaactcattccaatgttaactccaaagcccaaaattcaaagtctcatctgagacaaggcaagtctcttccacctatgagcctataaaatcaaaaacaagctatatacttccaagttacaatgggtgtataggcattgggtaaacatgcccattccaaaagagaaattggccaaaagaaaggggctacaagctccatgcaaattcaaaacccagcagggcaattattaaattgtaaagctccaaagtaatcttctttgactccgtgtcccatatccagggctcactggtgcaagaagtgggctcgcaaggccttgggaagcttcgcccctgtagtttgcatagtacagcctccacagctgctcttatgggctagagttgagtgcctgtggcttttccaggcacagggtgcaagctgccagtggatctaccattctcaggtctggagggtggtgacccctttctcacagctccaccaggcagttccccagtggagactgtgtggggccttcaaccccacatttcccctccaaactgccctagtaggggttctctgtgagggttccacccctacagcaggcttctgcctgggtaccctggctttcttgtacatcctctgaaatctaggtagaggctgccaagcctccttcactcttacagtctgcatgcctgcatgcttaacaccacatggaagctgccaaagcatatggcttttgctctttggagcagcagcctgagctgtacctgaggccccttgagccacagctggagctggaacagcctggatgtagggagcactgtcctaaggaggctgtgcagagccatggggtcctaggcctagcccatgaaatgattcttcctcctaggtctctgggcctgtgcctgtgatggcaagggctgcccctgagatctctgaaatgccttcaaggcctttttcccattgtcttagctattagtacctggctctcttttagttattcaaatttctctagcaagtggttgctccacagcctgcttgaattcctctactgaaaatgcttctgctttctctatcacatggccaggctgcaaattttctaaagttttacactctgcttcccctttaaatataacttctaactttaagtcattttttttgctctcacatctgagttaagctgttagatgcagccatgtaacttcttgaacactttgctgcttagaaatttcctctgccagataccctagttgtcactctgaagttcaaacttccacagatccttacagcatgaacaaagtgcagccaagttctttgctaggccataatgagggtggcctttgctccatttctaggttcctcatttccatctgagacctcatcagccacgccttcactttccatatcaccatcagcattctggttacaaccatttgaccagccaagtactattctaacttctgagaatacagaagtgctcctcatggaacttacagtctagtggaggaagaaggacaataaatgcaacaaagaagtaaattagtcaggatgtcagagagtgataagtcccatggagaaaaatgaagcaggagaaaaatgaagcagggatgcataaagttagttcagagagagaacaggatacaattttaaatagtgtggtcagataagggtttattaaggaggtggcatttgggccaagacactaaggaagtaagagaacaagctatgtagatagctgggaagagcattcctaggaagagggaacaagtatctaatagagaagcatgtctagtatgttcaaagaatagcaaagccttggtagccttaatgaagaaagcaatggagagagtaataagagatgatgtcagcgagctaaaggagggcatgaagattagagtagggccctataaactggatgaccactgtcaaatgaaattaaggctgttgaggcagaaatgatttgataaaagtttattggaagccaaatgtgaggatgaacccaggaaaacacaccaacaaagttgagagtgttctggagtctgttacaagttggaaagttagaagacaggagggggactcttcatacaggagttgtcctttttcactggagggtacaatacaaaggttacaataattggctacagattgcaacatgcagactaacatgtctacatgcaagacaatcagtaaaatgttatgactcagaaataaatcagtgtccttttcagtgtcagtaggtggtgcattgatcagtacatcaacaatttgaggaacttctaagattccttactcaggacaaggtatcgccatgaatcacaagaccttcccaagatgggttaatttggaagctgtttacttttaaagtaaactgtcaaatgtgacctgtaggttattgccatatataatttgtcatccaaattaggagacttctagaatgaaagttggaggtgagggttattaatcattaacactagggctggttgccgtggctcacgcttgtaatcccagtactttgggaggctgaggcaggcagatcacgaggtcaggggattgagaccatcctggccaacatggtgaaaccccgttctctactaaaaaatacaaaaaaaaaaaaaatttagctgggcatggtggcacatgcctgtaatcccagctactcagaaggctgaggcaggagaattgcttgaaccagggagtcggaggttgcagtgagctgagatcatgccactgcactccagcctggcaacagagcgagactccgtctcaaaaaaaaaaaaaaaaaaagttaacactagttcagtggagagaagccaggactgtgctggacaaactctgacgtgtaatcattctacttatagaccattgtaaggacttgggctttcaaaaaatctgactgagatgggaagcgattggaaggttttgagcagaaaagtaacatgatgtgattgagatatccctgactactatgctgagagtagattgaaggggcgtaggagcagccttaatgaagaaggattggctgggggctaacagaatgcagggaagaaactggattctgcatatgttgaaattatggcaaaagattttattgacagattggatgtggagtacaagaggaagagcagccaggaaaataaagtttccatttactgagttggggaggacttcaggaagagcagatttgggatgaaattaggagcacatgttaaatttgacatgttatgtttgagacacctattatatatccaagtgaggatatcaagtgggcagttattatgtgagcctggagttcactctctctatgtgttggtggtcatcagtgcagagatgatatttaaatcatgagactggattttttaaaaaggaagaggactgaagactaagttctgggcactccaattttgggcagtagcggagatgaagaaaaaccagcacactagatggtaaaggagcagccaacaaggtaagaggaaaaccaagcaagtgtcatttttgttgatttttttgatacagagtctcactctgtcactcaggctggagtgcaatgacacaatctcggctcactataacctctgccttctgggtccaagtgtttttcttgcctcagcttcccaagtagctgggactgcaggtgtgtgccaccacgcctggcgcaagtgtcatgtagaaagcagttcaaggatgaaagagaaatgagtttgtcaaatgccttgagaggtcaggtaagatgatgactgtgaattgactattgaattcagaaacatgcaggtcactgcggaccttgatagaggtgctctggtgaaaggtgagggctaaagcttaattgtagtggggccaagtgaaaattggaagaacaaagttgaaagtagcaagtagatatagcaatcttccaaggagtttcactgctaagggacagggagaaatggggcaggagctgacagcagaaactgggtcaagagagagcttttacagcctctttgcatactgaatgggaaagatccagtagagagggaaaagatttatgatgggggagtcaggagaattgctagagcaacatgtgctcctaatttcatcccaaatctgctcttcctgaagtcctccccaactcagtaaatggaaactttattttcctggctgctcttcctctcgtactccacatccaatctgtcaataaagtcttttgccataatttcaacatatgtagaatccagtttcttgcctgtattctgttagcccccagccaatccttcttcattaaggctgctcctacgccccttcaatctactctcagcatagtagtcagggctatctcaattacatcatgttacttttctgctgttggtaagggagtagggggtgggggaggggtaagaagtatataaggctggggccgggcacagtggctcacacctataatcccagcactttgggaggctgaggcaggccaatcacttgagcccaggagttcagtactagcctagccaacatggcaaaaccctgtctctactaaaaatacaaaaattagctgggtatggtggtgcatgcctgtaatcctagctacttcggaggctgaggcatgagaatcgtttgaacctgggaggcagaggttgcagtgagccactgcactccagcggggaggagagaccattcaggagaaacgggagaaaagacagagggtgtgggtacagatggagttaggctggtggattatgctgcttgtagaggttctctccattgcttctattttctaggtgaaataggaagccaaggcacagctgagggtgatcatgggggaggaggtgatggagttctgaagagaaagaaggtcttccaggatagagaatgaaccagggcaattaggatcctcttgaagtcactgatggtcagtttaaagtgaaaccagtcagatggaatatattttccatctacatttggctatgcaggtgctagcaagaagtaggagggaggttagatttaaccagctttatagtttcccacaaaagcaaggcagataagaaaggggcaaggaagatgattatgatgattaagcatggaatttaagctggccaagaaggggtgtgaggacatgagtaagatgagagatagcaaaaacgtggacatctttgccaggtatggagccaaacacagtatgcattgtctcatgtaatccccacccaaatggaattgttatcatccctctttacagatgaagaagctgagttttagggaagactgtaacttgctcaaagtcacacagctgatagagaagtgacacacccagcatcaggtcctggaacacttgtctccaaaggctatgtacttagccctatttgctttaactggagtattagtgggcattacaaaaattgatgcatatgtacaaaggatggtaattttgtccagtatgtttttgttaatacttttccaacttgagttaattttaagattttctgttgtacagaattctttaaaagtttatagtaaaatctatttatcttcaatttcctattcatcttaaaattaaatgtcacctatattttcttctagcttttgatttatttactcttggctctattttatttacatttattacatttggctctttagttgatcaggaattaatttggtatgtggtttatggtgggatactatttattcccccagtttttccatttttaccagttcttcagcttgtcgattgtcccagcaccagtcttcaacaatgtatcattttcttgataatttataattcatctttatcatatgttacaatttttcaacacttgggtctgtttctgtgatacctcttctatttcgttgattgatttatcttttgtgtgtgtgtctgtgtgtgtgtgtgtgtgtttgtgtgttttccaggaaacccagagtagtgtagtcattgtgtgtttttatatatgtaagagaacatttccccttatcaatgatctttttcaaaaatttcttaaacatattacatatttcttttttcagatgctctttacaaatattttttaacttcttaaaatatctcattgaggattccgttccaagatggccaaataggaacagctctggtctgcagctcccagtgtgatcgacgcagaagacggatgatttctgcatttccaactgaggtacctggttcatcttactaggactggttggacagtgggtgcagcccacggagggtgagccgaagcagggcagggcatcgcctcacctgggaagcgcaaggagtcaggggatttccttttcctagccaagggaagccgtgacagatggtacctggaaaaacgggacactcctgcccaaatactgcgcttttccaaagtcttagcaaatggcacaccaggagattatatcctgtgcctggctcgacagatcctatgtccatggagccttgctcactgctagtgcaacagtctgagattgacctgcaaggcagcaacctggcatggggaggggcatccgccattgctgaggcttgagtaggtaaataaagtggctgtggaagctcgaactgggtggagcccaccacagctcagcaaggctgactgcctctgtagtctccacctctggggcagggcatagctgaacaaaaagcagcagaaacttctgcagacttaaacatccctgtctgacagctctgaagagagcagtggttctcccaggatggtgttttagcttggagaacagacagactgcctcctcaagtgggtccctgacccccatgtagcctaactgggagacacctcccagtagccgactgacacctcatacaggcaggtgcccctctgggatgaagcttccagaggaaggatcactcagcaatatttgctgttctgcaatatttgctgttctgcagcctctgatggtgatacccaggcaaacaggtctggagtagacctccagcaaactccaacagacctgcagctgagggacctcactggtagaaggaaaactaacaaacagaaagaaatagcatcaacatcaacaaaaaggacatccacaccaaaaccccatctgtaagttaccaacatcaaagaccaaaggtagataaaaccacaaagatggggagaaaccagagcagaaaagctgaaaattctaaaaaccagagcacctcttctcctccaaaggatcacaactccttgccagcaatggaacaaagctgggtggagaatgactttgacgagctgacagaagtggacttcagaaggtcagtaataataaacttctcccagctaaaggaggatgttctaacccatcgcaaggaagctaaaaaccttgaaaatagattagacgaatggctaactagaataaacagtgtagagaagaccttaaatgacctgatggagctgaaaaccatggcacgagaactttgtgacacatgcacaagcttcaatagccgattcgatcaagaaaggatatcagtgattgaagatcaaattaatgaaataactcaagaagattagagaaaaaagagtaaaagggaacgaacaaagcctccaagaaatatgggactatgtgaaagaccaaatctacgtttgattggtgtacctgaaaatgacagggagaatggaaccaagttggaaaacactcctcaggatattatcaaggagaacttccccaacttagcaaagcaggccaacattcaaattcaggatatacagagaatgccacaaagatactcctcaagaagagcaaacccaagacacataattggcagattcaccaaggttgaaatgaaggaaaaaatgttaagcgcagccagagagaaaggtcgggttacgcacaaagggaagcccatcagactaacagcggatctctcggcagaaaccctacaagcccgaagagagtgggggccaatattcaacattcttaaagaaaagaattttcaacccagaatttcatatccagccaaactaagcttcataagtgaagaataaaatcctttccagacaagcaaatgctgagagattttgtcaccaccaggcctgccctaaaagagctcctgaaggaagcactaaacatggaaaggaaaaaccggtaccagccactgcaaaaatatgccaaattgtaaagaccatcgatgctatgaagaaactgcatgaactaacaagcaaaataaccagctaacatcataatgacaggatcaaattcacacataacaatattaaccttaaatgtaaatgggctaaatgccccaattaaaagacacagactggcaaattggataaagagtcaagacccatccgtgtcctgtattcaggagacccatctcacgtgcagagacacacataggctcaaaataaagggatggaggaagatctaccaagcaaatggaaagcagaaaaaagcaggggttgcaatcctagtctctgattaaacagactttaaaccaacaaagatcaaacgggacaaagaaggccattacataatggtaaagggatcaattcaacaagaagagctaactatcctaaatatatatgcacccaatacaggaacacccagattcataaaacaagtccttagagacctacaaagaaacttagactcccacacaataataatgggagactttaacaccccactgtcaatattagacagatcaatgagacagaaggttaacaaggatatccaggacttgaactcagatctgcaccaagcagacttaatagacatctacagacctctccaccccaaatgaagagagtatacattcttctcagcaccacatcacacttattccaaaattgaccacatagttggaagtaaagcactccttagcacatgtaaaggaacagaaatcacaacaaactgtgtctcagaccacagtgcaatcaaattagaactcaggattaagaaactcactcaaaactgcacaactgcatggaaactgaacaatctgctcctgaatgactactgggtaaataacgaaatgaaggcagaaataaagacgttctttgaaaacaatgagagcaaagacacaacgtgccagaatctctggaacacacttaaagcacggtatatagggaaatttatagcactaaatacccacaagagaaagcaggaaagatcaaaatcaacaccctaacatcataattaaaagaactagagaagcaagagcaaacaaattcaaaagctagcagaaggcaagaaataactaagatcagagcagaactgaaagagatagagacacaaaaacttcaaaaaaatcaacgaatccaggagctcgttttttgaaaagatcaacaaaattgatagactgttagcaagactaataaagaagaaaagagagaagaatcaaatcgatggtataaaaagtgataaaggggatgtcaccaccaatcccacagaaatacaaactaccatcagagaatactataaacacctctacacaaataaactagaaaatctagaagaaatggataaattcctggacacatacagcctcccaagactaaaccaggaagaagttgaatctctgattagaccaataacaggctctgaaattgaggcagtagttaatagcccaccaaccaaaaacagtccaggaccagacagattcacagccaaattctaccagaggtacagaggagctggtaccattctttctgaaactattcctagcaatagaaaagagggaatcctccctaattcattttatgaggccagcatcatcctgataccaaagcctggcagagacacaacaaaaaaaagagaggccgggcgcggtggctcacgcctgtaatcccagcactttgggaggccgaggcgggtggatcatgaggtcaggagatcgagaccatcctggctaacaaggtgaaaccccgtctctactaaaaatacaaaaaaattagccgggcgcggtggcgggcgcctgtagtcccagctactcgggaggctgaggcaggagaatggcgtgaacccgggaagcagagcttgcagtgagccgagattgcgccactgcagtccgcagtccggcctgggcgacagagcgagactccgtctcaaaaaaaaaaaaaaaaagagaattttataccaatatccctgatgaacatcgatgcaaaaatcctcaataaaatactggcaaaccgaatccagtagcacatcaaaaagcttctccaccacgatcaagtgggcttcatccctgggatgcaaggctgtttcaacatatgcaaatcaataaacataatccatcacagaaacagaaccaatgacaaaaaccgcttgattatctcaatagatgcagaaaaggccgtcgacaaaattcaaaagcccttcatgctaaaaactctcaataaactaggtattgatagaacgtttctcaaaataataagagctatatatgacaaacccacagccaatatcatgtggaatgggctaaagctgttgacctgatagatatgggttcaagaggacacagctgaatactgtgcttaggaaaagaacagtttcaaaggctttccagattgtcagatttgatgatatcctccttggtgcacacctctcttggctatggggcacataaaccacctctaccaatctaactggtttgtgcagtttttctgattttgtatctaccggcaaaatatatcttaagccatttttaggaaacaggaggtttagtcacgtgctcaacaaaagcacaacaaatggggagcatttaatggtgtaagggctgtgaggtgtagctgctgaaactgtagctaggagctgccttgctgccttcttgcaggcagattggccagatgagccaggctaaaatacaattaatatctaccattgtggtttaatatgaaatatggatacctggtctttgtctcagttcttgtcatagagttccccaaacctttagaacttcctgagtggtaggaatatctcattagtgataatgagcccctttgattcgataactcctgagtttatgctaatgaggttacttaatgtggggccctagatattcttaggatggggctagttcccggaaagaccaggtcatttgaggattagagggttggaacttttagctctacccactgatctctgggtggggaaggtgctggagatcaagctgcctaaaaactcttgaacaacaagatttgaggagcttccagtaaatgcgtccacaagctgggagggcactgcaccccagtttcactgggacagaagctcttgcacttggaatctttccagacctagcccttcatgctgcttcatctggctgttcatctgtatcctttataataaattggcaaatgtaaaggtttagctgaatttggtgagcctttctagaaaattaattgaacctaagaaggggtctgtggaaaccctggtttgtagttggtaggtcagaggtgcgtgtggcttggatgttcgaatggcatctgaagagggacagagcacacaacctgtgggatctgacactatctccccgcagatagggtcagagcttaattctattagagaacaccccattggtatctgctggagaattacttggtgtatgagaagccccccaccacatctggtcacagaagtattgtgggttgagtgtgacagtacagggtaaaaagtggtttgttttttcctctaacagtgatcactccctctcaaaggagtgtggaaggttttctggataggaatactgcatataatcatttggttcacttcagaaactactataattttgactgtgctggttcacttccacatgtacaaacacacacacatacacacacattgttgtcacctaatatttgcgttaatacaatgatgttatttttatttggatagtatttgtatgattggaaatgagtgttaatctttatatgtattttaccagtccttgactaacatgttttcaagacatcttaccaatccatttcattgaattaatgagtaaggagactctctagaaatggttggtttgtaaagcaaggacattatctggaagaatcatccagagtttactgtatgacgagcatttcttgatagcaaggttcattttggtgtcaatcgttacagtcagtccatttcagtgggaacaacgaatttctccacagggtcttatttttctgtttttcacttcaccaaatggggtagatattttttcagaatgcagttattagaaccttgggattttcttctgtctccattgagtctcttgtttttttcccagatctgaacctgaaaataaaatagatgctaaggaaaattaaatattcaagactttcctcctcaaaatgctccatccaaattgacattgaaaaatatttctccaatcaatgaacaagtaactatttgaactctaatgagaacctcatggtgtagatctaatattttatgcttttaaacatctgaggctactttcttaattaagcatagaagccagaatttaaactctttcacagttttcccaagcaaaggatagagagggaggcatgaaattcttggcaattaaagttgatactgaagtagttctatcattagaagaaaacaacttatcaacaatgggcactttttgctataaatgttctgtcagggatcagaattaattcatatgcagagttacctttatcaaggccaggcactgggaacactttatcttttataacctcaaaatagccgtatgaaatatcccatatagcagatgggaatactgaagcttagtgaatattaagtgatatgcccaaatttttgcagtagatttgggatttaaagccaggcagtgttactcgaaactctaaacttctcctaaataccactaatcttttaaatgtttgctgtggtgtcataaaaagatactggtctttgtccctggctcctaacatagagatcctaaatctcttataatttctggagtgatagggagtgataaaagcttcttttgttctaatgaggcaacccttggctgggcccttagatagcttcagggtgggggctggtcaccagaagactaagcctggattagaagcctggaacctctggggagaggagagaggctggggatagacttaataatccatcatgccaacatgactaaacctccatgaaaacctctaaatgatggggtttggagaacttccgagttggtgaccacatccacatgccaggagggcagtgcaccttaactccgtagggacagaacctctgcactcaggacccttccagacctctctgtatgtacctcttcatctggctgttcatttgtatcctttgtaagaaaccgctagtggccagtgttctgagtgctgtgagtcattctagcaaataatcaaacccaaggaggggatttgttggaaccccagacttggtagcaaagtcagagagaaatgtgggtaacctggggacctgacatttgtgagtggcaagtgaagcaaggcagtattgtgggactgagtctttacacctgtggagtctgatgctaaatttaggtattgtcaaaattgaactgcattataggacactcaataggtgtcagaattggtttgcgtcaagaagaaaaacccttgcgcaatctcataagccaaaaaaagatgttgaattgttttatttttgcatttccttattaatgtggacaaataacttttttcatgtatatattggacactgaagtgacttcttctgtaaactgtctgttcttgtcctttgctggttttcctactgaattgtttgtctttttctcactggttactatgagctttttgtatattaagtatattagccttatgtttaggttttgtgtagcaaatattttctcctggcttattgacttttgtctttgtgggtggtttctttttgccttgccaataatttaaaaaatgtacaatcagatatatcaatctgttcctttatggttctttgattttatgttatgctcagtaagatcttctctaaggttataaaaatgtttgtttcctcctggtatatttatgattttacatttttaggcctaaattttttaactgtctggattttatcttgatgtgttttttttttggagacggagtctcgctctgtcacgcagactggagtgtagtggcgcgatttcggctcactgcaacatccaccaccctggttcaagcgattctcctgcctcagcctcccgcgagctgggattacaggggtgcgccaccatgcctggctaatttttgtatttttagtagagatggggtttcaccatgttggacagactgttctcgaactcctgacctcaagcaatctgcctgcctcaatctccctaagtgctgggattacaggtgtgagccaccatgcccagccaatgcattttttaaagagacaactttttaatttattcaaaatgtctagctgaatgttctaataccttttactgaataactattcccccttgactttgctactttttattacatactgaatttttatattttcttgggttttatcctgaactctatcctattccattggtttctattcctataccattatcacattgttttaattactattgctcaacaatatgctttattactattattattatttttgagacagagtctagctctgttgcccagtctggagtgcggtggcatgatgttggctcactgcaacctccacctcccgggttcaagcaattctcctacctcagcctcctgagtagctgggactacaggtgtgtgccaccatgcccagctaatttttgtatttttagtagagacagggtttcaccatgttggccaggatggtctcgatctcttgacctcatgatccgcctgcctcagcctcccaaagtgttgggattacaggcatgtgccaccgcgcctggcctattatttatttattttttttgagacggagttttgctcttgttgcccaggctggagtgcagtggtgtgatctcagctcactgcaacctctgcctcctgggtcaagcagttctcctgcctcagcctcctgagtagctgggattacatgtgactgccaccacacccagctaattttttgtatttttagtaaagatgaggtttcactatgttggccaggctggtctcaaattcctgacctcaggtgatccacctgcctcagcctcccaaagtgctgggattacaggcgtgagccactgtgcccagccaacaatatgctttattatctgatagagctagtctctacttattactcttctatttcagaaccttcctagctattcttccatgcttattctccctaaggcattttggtatcattttgttaaaagtcctacttaccatttcactttctgcatctgctctaaggtttctggaagagtcattcccaaactttcagggaaaaaaagggtgaggattccaatcaggacagtcagactacccatgacgatgtagggcagcattctgttgtaagcacctgtaaagcccgggacataagaacatcaatcagataggaggactctctgggcactcttgagcatcattttgtgaagttggtgaacagtataagagaatggatttaaatctgaacattttcagagaaaaaaaagtaagcaaaatatcagtttctttttggcagatgacattgtgcatgtctataatccttttgcattatcataaggcttttcattctttcctgtcaactggtatcctctaagctactactcagtcatgtgtgacagatgttcctttggtagagttctttgcctaccagagttctcctcttaaggtggaggtaattggaaatgggggatgggaggacatcaaggagaaggaggttaaccaggatgtttcagggataggttttggctatgataggtctggcatgactctgcttttgcccaaactagtaggctgcagtggaaagttaggtccacagggctatgagactcaaaaaaaaaaaaaaaaaaaaaaaaaacaactaagtattatgttcacttcagattaaatcagtaaattataagtatcaggcacattctgtaaaggcactgtgtgcctggatttggcttctttttggagcacttacatgtcttgggttaatatgtaatctctttgtgaagctttactcacacaggagaaaaacagatcctcatcttgctttgcccctgtatacatacagagcttacagaggaacagcacacccatggatttcatttgacccaaaacataaggaaaatattgttattgcagcttctctgaggcctctgtgtcactaacaggagtagctgtgtggagtaggagactcttggactccctgtcttatgtaccagtgtctgaccactggaccatctgagcatagtttgaaatagtttgaaagtacagggaaggacaaagggaaaaataacaccactctgtataatctgctatctcaggtgtggcacagggcaactgtgcagaatatgtttgttaggaaaatgtttctctttctctgtaagggtttggattatacctttcctgagaattcatacatgttttcaggtgtgtgtgtgtgtgtgtgtgtgtgtgtacgtgtgtaccagtaggtaaccaattgcccaattgatgaggtgtgtctgcatttctcaccagtagagtccttaatgaggaccaggcatggggtgtcagatcctacatcagattgaacatgccgctgaaacacctctgtagtttcatttcagattgacacctttgagtatataaaaactaaaattgtcttcattacaaagatatcataaagtgaaaatacaaatggtaaactaggaaaaatatttacaacatatatacaaggggctaatttcttccattgcaaagagtttgcacaagtcaaaaagaaaaagatgaatacacctgttgcaggaagttagggaccccgaaaggagggactggctgaagccatggcagaagaatgtggattgtgaagatttcatggacatttattagttccccaaattaatacttttataatttcttacgcctgtctttactgcaatctctgaacataaattgtgaagatttcatggacacttatcacttccccaatcaacacccttgtgatttcctatgcctgtctttaatctcttaatcccgtcatcttcataagctgaggaggatgtatgtcgcctcaggaccctgtgatgattgcgttaactgcacaaattgtttgtagagcatgtgtgtttgaacaatacgaaatctgggcaccttgaaaaaagaacaggataacagcaatgttcagggaacaagagagataaccttaaactctgaccgctggtgagtcgggcagaacagagccatatttctcttctttcaaaagtaaatgggagaaatatcgctgaattctttttctcagcaaggaacatccctgagaaagacaattcgtccctgagggtaggcctctaaaatggccactttgggggcagctgtcttttacggttgtagctgtagggatgaaataagccccagtctcccgtagcactcccaggcttgttaggatgaggaaattcccacctaataaattttggtcagaccggttgtctgctctcaaaccctgtttcctgataagatgttatcaatgacaatgcgtgcccaaaacttcattagcaattttaattttgccccggtcctgtggtcctgtgatctcaccctgcctccatttgccttgtgatattctattaccttgtgaagcacgtgatctctgtgacctacaccctattcgtacactccctccccttttgaaatcactaataaaaacttgctggttttatggctcagggggcatcatggaacctgccaatatgtgatgtctcccccggacacctagctttaaaatttctctcttttgtactctgtccctttatttctcagaccagctggcacttagggaaaatagaaaagaacctatgtgaattatcagggctgaattttgcccgatatacaccattaaagaatgggcaaagaaggccaggcacagtggctcatgtctgttatcccagcactttgggaggccaaggcaggtggatcacctgaggtcaggggtttgagaccagcctgaccaatatgatgaaaccccatctctactaaaaatacaaaaaaaaaaaaaattagccggacatggtggcatgcgcctgtagtcccagcaactcaggaggttgaggcaggagaattgattgaacccaggcggcggaggttgcagtgagctgagattgcgccactgtactccagcctgggtgacagagtgagactccatctccaaaaaaaaaaaaaggggcaaagaacatgagcagtcagttcactgaaaaataaataaaatggccaaaaaatacacaaaaacatgctcaacctcattcataattaataaataggaatgaaagtaacaatgatatccatttttcacataacagataaccaatgattaaaaaattaggtaggccaggtgctgtggctcaaacctgtaatcccagcactttgggaggttgaggcgggtggatcacttgagcccaggagttcgaaaccagcctgggcaaactggcaaaatcccgtctctaccagaaaaaaaaaaaaattagctgggcttgacggtgtgcatgcctgtagttccagctagttgggagtctgaggtgggaggatctcttgagcctgggggattgaggctgcagtgagctgggaatctaggatcgcaccactacactccagagtgagaccctgtctcagaaaaaaaaaaaaaaaaaaaaaaaggtaatctttattgttggtgagattattgaaaaccactcttacctattaataattagattataattggcacaatatgtagagttcaatttgggaatatctatgaaattttttaatggctctctttgctccaggaattttacttctatgaatctacctgtaaatccaaatatacgtaagtaaattcacaaagggtgtaggagcataggagaatgttcgttgtaatgttatttgtaatagcaaaaacctggaaatgacctacatgtcctccattcattggagcctggttaaataaattatgtgtttcagtataaaagtaagattttcattgtgaaaacttcaaatggcatggaatgtactggaaaaaagtacaagttcacctcccctctcccaggaggatccctagaaaaccaacatgaactgtttggtgagtagccctacagacattttgttttgcacaacattatgtacacacacacatatatatataattttttaacggcactctttgctccaggaattttacttctgtgaatctatctgtagattatacttacatatacttattttaaaatgtacttatatacatttttaaaaggaggtacctatttaaaaagaaggtaaaggagcaatatgtaactatttggaaggatattctgatacaatgttaagtttaaaaagttttaacatatataatgttatttgtgtgtttattctttttattttttattatttttatttatttttgagacagagttttgctcttgttgcccaggttggagtgcagtggtgcaatcttgactcactgcagcctctgcctcctgggttcaagcaattctcctacctcagcctccagagtagccgggattacaggcacctgccagcacacctggctaatttttttatttttagtagagacagggtttcaccatgctggccaggctggtcttgaactcctggcctcaggtgatccacctaccttggcctcccaaagtgctgggattacatgcatgagccaccacgcctgagttgcttgtgtgtttaaaaaattatatacatacctgtgtacatgatgttgtgcaaaacaaaatgtctgtagcgctactcaccagtttgtgattggctttctagagctcctcctgggagaggagaggtgaacttgtacttttttccagtacattctatgctatttgacattttcacaatgaaaatcttacttttacattgaaaactaatttaaaggaagaacaaatgcacaagatgcagctcaccgaggtaaacaaagtaggg

SEQ ID NO: 334 - DNA, 494 bp, Homo sapiens
  misc_feature (142)..(142): n is a, c, g or t.
  misc_feature (145)..(145): n is a, c, g or t.
  misc_feature (148)..(148): n is a, c, g or t.
  misc_feature (152)..(153): n is a, c, g or t.
  misc_feature (155)..(155): n is a, c, g or t.
  misc_feature (335)..(335): n is a, c, g or t.
  misc_feature (432)..(432): n is a, c, g or t.
  misc_feature (469)..(469): n is a, c, g or t.
  misc_feature (493)..(493): n is a, c, g or t.
gagaagcagggttgagctccctgttggccgtgcatcgacacagtggctcccctggggttgtcttgagtagaactgagcatggctgggctggcccactgctcctggcagagatcatggcggagtggtcagccccgtgccacangangangcanntngggacggcctcttgacagagcaggcaccttggccgggagctggcttaattccagctgttctccaaaggctctgcaggttagcatggcctttttaactccagacttttgtcaaaacatgaagtcagcagcatcacagccccaggcccgagggtgaagcattgggggggtcccaggtgattncatacacatggagccagataagggaagggattgcggggcttgcaggggtctatgttggggtgaaccctgttggctttatttgatctctcggtgtttnaacctcctgaggcaattgtgggaatttagatgtggcncttcggtctgagcccacggtctana

SEQ ID NO: 335 - DNA, 31737 bp, Homo sapiens
gatctgaagcctcttaaaggttccacctcttaatattgttacagtggcaattagatttcagcatgagtttggagaagacaaaggtttaaaccataacatggtgtaagtcacataactctgggtcatatgcatatgaaagaattcgaaatttctctatgaacacatgctagtcttatttgggtttagagaaatctttagttgcagctgttaattcatcctgggtccaaggtttacatctgacagttgcctacatacttggctcttgaaagcatagatctttagaggtaattggcattttggaattttaggatattttttgggaaaataaagggggcctgggcaaaggatagaagagggaggaggtgcagaaggagaaagattaggcagggtacggtggctcacgcctgtaatcccagcactttgggaggccaaggtgggcagatcacgaggtcaggagattgagaccatcctggccaacatggtgaaaccccgtctttactaaaatacaaaaaattagctgggcgtgatggtgcgtgcctgtagtccctgctactcaggaggctgaggcaggggaaccacttgaacccgggaggcagagattgcagtgagccgaaattgtgccactgcactccagcctgatgacagagcaggactctgtctcaaaaaaaaaaaaaaaaaaagagaaagattagaagggtaaaggggaagtagaagagttagatataaggcagcaactagaggaataggagggggaggatattgcttaagtttgccaaattgttcaatggctttattcaaggaaatttttactgaaacaattttttattcagaaccttggagattgtacaaatacgattcattccaataaaaaactactgcttactgggcctgagaaattttgttttctttcttttctaatgcatctcttaaattaacagtttttgttttcttttcaactgaaatgttcctcctagtagccactgaaggcaaaaattatccgggtgaagttatgccacttagaaacctaaacactagaattgtgattgtaatcagagtacatataacatgcaggagactttcctggaaaggagacgatttcaatttagacgatccaataagtgctggcactgtctgagaggagtgtaatgattatgtaccttaggcctggttctacagcatgataggtggctacttccccacaagaacacgacaatcttcacacctcagcatgcagaaaatctgagaatactctttctgaatgaatgcctaattctctggacaaaaaagaaaaaaaaaaaagaaaaagaagataagagaatcttatcccattttatcagtgacccaaagcaaagtctgtccaaatggtcaccagtctgttgagaatcagaaaacccttggtctgtgatattagctgaaacaagtcactagagcctatgcttgagttttttttgtttttgtttttttaacggagtttcactcttgttgcccaggctgaagtgcaatggcgtgatcttggctcactgcaacctctgcctcctggattcaagcaattctcctgcctcagcatcccgagtagctgggattataggcgcatgcctggccaattttgtattttttagtaaagatggagtttttagtaaagatggggtttctccatgctggtcaggctgatctcgaactccggacctcaggtgatctgcctgcctcggcctcccaaaaggctgggattacaggcatgagccaccgcgcccagcctatgcttgagttttaccctattattatcctcttcatgacaatgctttaagaaagtacatcactaaactgttacatataagatagcaaaaagagatgaaaagaaatggtgtgatactatcaaggatggcaatgtcacgggagccaattaaaaaaaaaaaggaggcggggcgcggtggctcacacctataatcctagcactttgggcgtctgaggcaggcagatcacctgaggtcaggagttcgaaaccagcctggccaatgtctctactaaaaatacaaaattagccaggtgtggtggcacgagcctgtagtcccagctactcgggaggctgaggcaggagaattgcttgaacctgggaggtggaggttgcagtgagctgagatcctgccattgcactgcagcctgggcaacagagtgagactctgtcttaaaaaaaaaaaaaaaaaaaaaaaggtgggggggactaaacagagtctaaatagccaagaaacccagtgcaaagacagtagtgttcaaacttgttgctaacttaacatgtcatcatggatttgacaaggtgtgaagagcaaagcataaaggacctctgtggttactatacctgtttgatgactatggcccatggtgatgaacaggttagacgttatttcactgggacctctgtaagtatgatacattgtaacataatttctacaatggtcacatctaattatatcaatcctttgttcactgcaccttcattagtaagaagtatgcttaatggtagcattcatggactgcaaacagacaacttggaaataaatgaagacccaaatgagaacaaacatagcctattaaatcagaccacaccgtagtaaaggagtcatccacaatctcttgcactcagcagagcttgaaaggcaagcagaggtgtaaaaagcttcatagtagataaaaggtaaagtattaggtatgccatgactggaggctatagtcttgaggagtgtgtgtgtgtgtgtgtgtgtgtgtgtgtgtgtgtgtgtgtgaaggggttatttagaaggttgacatcctatgtgattggctagtgatgcactgactttctccagttggtcctaagttgaacatatgggcaacaattagaaagctgtcagttcttagtcatgtcttagccattttaagcgagttgttatgtgggatgttgtctggcttcctggccttgttgctagacatagtattctgacttgggagtggttactgtagataccacattagatttctgaatgggttggtgtagattatgggtcagagtcaatttttatatttggtgtagccgttgtccatttgtatagcaaatttctcacacctaaataaggaactatccacgttagtgggatttcttatttttaactggttatgttgaaaattagtttaatattcattaatttcccacaaccctttcaaaggtttgtttttgccagaccttcagttgggcagagttaatttttccttttttttttttttttaaactggttggcaaactaaattgtaacgctttggccaaaaaatagccctttccttttctgaatataaagagaatgggttttaatttttggtcttttctttgttcttccttcactaatcctgcagaagagaccataaggcattatccaaatcttcatttgttgggggcatggttttcaggtagtattgccaccacctgatggcaatactattgctactcaatttttctctcactgctactcaattgcagtgagagaaaaatagctctaaatgccgactttttgtagtgcattgtaaaaagctgaataaagccagggacggtgtcctgtacctacagtcccagctgctctagaggctgaggtgggaagatagctttagctcaggagctgaggccttatcataaggccttataagactacctggaggcttcatctgcatgatataaccttggtcttcacaaccccttgtctttttttgtttttgagacggagtttcgctcttgttgcacgggctggagtacaatggcgagatctcggctcaccgtaacctccgcctcccgggttcaagcgattctcctgcctcagcctcccgagtagctggcattacaggcatgtgccaccatgcccgtctaattttgtatttttagtagagatggggtttctacatgttggtcaggctggtctcgaactcccaacctcaggtgatccgcccacctcggcctcccaaagtgctgggattacaggcgtgagataccacgcccggcccacaaccccttaacccagacaaccatttctactgattccaggtctttagatacaaactctttcaaccaattgccaatcggaaaatctttgaacccacctgacctggaagccccgcccctcccttccagttgcgcctttccagaggaatccaatgtacattttacatgtattgattgatgtcttacgtcttcctaaattgttaaaaccaagctgtagatgggccaccctgggcatatgttcttaggatatcttggagccgtgtcatgggccattagtcactcatatttgtctcagaataaatctcttcaactatttcacaaagttccacccttttcgtcgacagaaagatattcctccttcaactctccatcacatcctgtgtgggtcttttctttcttgtcccaacagaagcacactaacgatcaaaaaaaagtctccagagcctcagtatgtgtgtacttgacaagcacaaaagagctgaccgctatgaatggaggaccagttcattatggtcagccatgtcgcttctgatgttcttcctttcgggacttgctgtgcttcagagaatctgaaacgacaggtctctgaaatatttctcagacttgtcctagactgctctccgggaaaatctggttacttgcagtttaggagtcagcaaagcccctccacgtccttaagagccccggaactgcatttcttaacgctcctccaggagcctccagcttttttccgtaaggtccgcgcgcccagcattgtgaggcgaggcaggcagcagcgtgggaactacattacccagaagacactgcgggcgacacaggcagcaacgtgagaactacattacccagaagacactgcgggggcagggcagcgagtgtagccattggtctagcagagagacgactaatgaggtctcaattgtgtgggcgggacttctggcggcgccctcatggttgcgttagcatggctacctagggatctgttcactgatttagagggtcccagagctctgggtcgggactgaggtgaaagagcggaaaaacgcgagaagcggtgttccttctacacagaggctagagtgcggatcggctgagtcggctgcaggcgcccctgcctccgtcagcgtccaggtgaccgccgttcccgccccgctcttccctgggtggactggaggaggccgcgccgatgaacctgaccgaggtgcgtgcagcgtcccaggccgccccgcccaacccctcctcccagtgctgaagtcccaaggagccgccctgcaggttaggcccttgtgtctctaagagaggggcgttcttgtgtggggtgcccgggactgggactgcggtgcgatgaggcgggggagctcccgtcggagaccgacacgtctctggggcttggaggcactgcagaacgggcggcactggggagcccgagcgtctttgtctccaaggagcagaggttgaggcggagtctcccctggaagggcagtggagccgcagagagccatagagggctgtgcagggaggacgaatgggagggtcacgcccagagttagaagtttaaagttggggaaaacaggatgttgaacgggggcagggggaccgctgaggagaccccttgagttatggtagggctgggccagaggggttgcagtagaggggagatgtgatgagactctggatggatctcagagatagggtcaacaggatttcctgctgcatcaaacatagctgtgagggaaagtcggtagtgaatggtgtcttccataggttttgttttggcctgaaaaatctgaaagaatggaattagagatatcagcttaaggagcgggtttcagacagaagatcctgggttggattttgggcgacatcacatgggtaggtggacgtaatttccaaaggtgagggaaggtagctggcctggagctttaaatgagttagaagttgtgcacttgagaagttggcctgtggatcagattgagaaggaagaatcctacatcgttttttcatatgggctgaggtaggggagggctcagatttggaggaaagaccatggtagggagggcatctctgatactccctgcagaagggagcagatatgggctaagagtctggtctgtttctgttgaaaaagaggcctggatggataaggagttgccctggaatacagagactgaggcatgagataattgtagtcactccacccttctaactcagctggccctgagggccactctttagggaacaagataaggccatgcagcaactgggtccaaaactgggcagggctttctcacatcctccaccacagttaagggcctccagcaagctccctttactgcattatatggcaggctgacctgtttgctgaacggaccagtaactgattgactgctcagccccatcctacaactcattaacttagggatgtaaaaacaggtaattgacttaaacagtaaggaactatatcaatcttaaataaccaagcaagtcagaatctagtttaaagagagtttattcaagttcacatgttgatgatagccatctgggaccatagattcaagttgtcctgaatatacacttcaattaccacagtgacaagtgtttgctttttttttaaggaaaaaagaagcagtttctgagttgtttaccaataacttatgttaaaataagataagtttttattggctatacattcttatttatattatagattacagaaacatgaagataataggtgagacagctagtcaggaacagaatgtcttaaaacagttgtcctcaggcataggttcagggatgtgactgacatctcatatattcttgcctctctgagcctgatacattttgtgtaggtcagacaggtctgggctatttttttttttcctcagccaatatccttctaaatatgtacacataggcaattggaaatagatgtaatcaataatttaaatgtattaaaatatttattgttagaatgttaatttacctgtaactctgcttatagtacaaagctttatatatatatcacatttccttaaaacattaagaagtgtgggctgggcacagtggctcatgcctgtaatcccagcactttgggaagcgaaggtgggcggatcacgaggtcaggagtttgagaccagcctggccaacatggtgaaactctgtctctactaaaaatacaaaaattacctgggcgtggtggcgggcgcctgtaatcccagctacttaggaggctgaggcaggagaatcgtttgaacccgggaggtggaggttccagtgagctgagattgtgccattgcactgcagcctgggcaacagggcgagacactgtctcaaaaaaaaaaaaaaaaaagggaaaaatactcaaattttcaaaacccttctactttgtgctgaaaacatgtacaaaaccattaatcctatagaaagtaatgcttatacatagtgtgtactacttatgcttcttgtcaatatgagccctgtgaagtgggaacccttttaatctccattttacacataagggcactgaggcttagggaggttcagtccttgtccaaagacacagagctgctaagaggcagcactgaacttaggacttgctgtagcttcagattactttgctccagtacagggcagagatggttgtacagctcagcctgtaggatgccacagtactgtcctgatactcatggcttgcttcttcctgttacaggccgaaagaatgagggtcgtgatcaactcagtatgccactggaggctatatgagtaaacagcaaactgtttctcatgaaagcaggatgttggcaaactgacaaactgcgtctgccacccagaaggaatgctgaaggcagtcacgacccaggcacaagtgtttcttgtgattaggcataattgaagcctgttaacaataatgtgaacttgtgatcaattaagcagctgaccagtcgttacctcctcctccctttcatcctacccaataaatgtggagggctgtggaagctcaggggctgcctttgctcactagaagcagggagctctcttcttccccagttcgccttctttaaaacagtttctttcgtcttaagttttcatttctacgttcgtcccccttcattcagtctcgtaatgatggtctcaagtagtaacagtaactgtcgtagtgatggtctcaagtagtaactgtacaagtctgccacatcttcccacagggtccattgcagtggcagcaatgcataaggaccctgcacaggtaagtcaaggatttctcaggctctctaccccaggcccccaccacttatctctccgttattttaggcatcctgatatagggaaaggtggtgtcctgaaacttcatgtttttcccttccttgggtctgaagactgtggttccacgacaaccaggagtcagaactcagcctctggttatagagtggtcctagttccgacaactgatgggataagatgtggcagggcgttcaggcacgggatatagaaagttcaaatgcttactggtgcgacttagctgggatgtttagtgaactgaaaatccatgttgtatctggtcgtgatagagtatggcagcagggtaggaggttggggcatacagggcatgcgggatcggcatggaatggcagtctaaggttctgggcctttcatctgagggcgatggtaactagggaaggtttgaggaggggggaaaaagaggtgacctgacccaggttttagtggctccctctgcctgcagaatggaagaccacgtgcaggtgagggtggagccaccgatacctgggtgatgggtccagcaacagcccaggtggaggttgttggtgactgaacgagagtggcggtggtggaagtgggaggagtggggggcttctgtatgtgtttgatctagagctgcctgtattttataacgtagagagcaaggaagcttgggagctgagatggaagagggggtcaggaatggccccacagttttggccttatttggaaggatggatgtcccagcaactaagatgtagtaagttctgtagtagggggagtgtttatatagtagagcatatgaggaaccaagttttggccaagtcaaaaatgttccagtggccaggcatggtggatcacacctgtaatcccagcactttgggaggcagaggtgggaagattgcttgaggccagcctgggcaacatagggagactctgtccctacaaataataataaatagctgggtgtggtggcgtctctctgtggtctcagctaatcggcgtgctgaggcaggagggtcacctgagcctgggaagtaaaggctgcagtgagccatgattgtgcccctgcactccagcctgggcaacagagtaagacaaacaaaaacaaaaatccaagccaaaacaaaaacaaaaatacacaaaaaatgtttcagagactttgagtggaggtgccaggctggcagttgtacacacaggaatggagttcattggaggtgttcaggaaggagacatccactacatgatagctgaactgttgtgaaactgggtcagatttaggaagcaatggtgttagtaggaaggaaggagaaggaacagactgaggactgggtgtctccactgggcacctggatggtgttggtgggtgtcacaaagacagatgagagagtggatcgactgagggtatgtgtgtgtatgtttgtgtgttatgttgggggcagcctgtggagtataaggaagggcttttgaggggagagtggccatgagatggatggtgaggcatctccacaaactcaccagggtttcatggtgagtcttgcttggacctgggtagtttcatgcaaactgtgagactactttaggggaagatgggatcagcaaggagcattgctaggcctggggtggggatagcattggggaggtcagtgtatctgggctttggattaggattagggggatagagaatgttgtgactgcttatgggaaaacatgtacattgcaaaagggggagacagccaagatctggaactcagaggaggtatgcaagaactgtgaggttgtcacttgggttttgggggggctgaggttaaaccagaaaacaggactgggaagggagaccttcagaacagggctcggtgctgccccaggcgctagggaacattatattctgggcagcccaggagcaaatagggttctggtgcactgcaggactccatgtacagagtggcatcttgggaggccatggaaatgctcctggttgggccagggctgctgttagtattgcaagagtggaggcattagatacatgagagaggtactgtccaaagcgagatgcgaaggtgaggaggagcatgaatgcgtggtcccagccctggcaatgggcacgtaagggagaagagtgagcctgagtttgggtgtctgggaggcaagatctggagaccccaaggaaatggggtgacaaaagaaggtagggccggccgggcgcagtggctcatgtctgtaatcccagcactttgggagaccaaggcaggtggatcacgaggtcaggagttcgagacccgcctgcccaacatggggaaaccccgtctctactaaaaatacaaaaattagccgggagtggtggcaggtgcctgtaatcccagctactcaggaggctgaggcaggagaattgcttgaacctgggaggcagaagttgcagtgagccactgcactccagcctgggtgacagagcaagactcttgtctcaaaaaaaaaaaaaaaaaaaaaaagagggtagggcgccctgggctaggcattgatgatgcttttgctttctccccacccatctttgtgctgtgctggactcagcaatcagtagcagtgggggcgagagaagtgcgaatgctaccaggatgtggagtctcttcctccttgggaagtgggtggaggctaagcaggggatggatgtgtgtgggtactggggaagcactgaagattctggagagggaagtgtatcagtgattgacccgctggattttcatttttggaaaagagtgagtgatgacagagaggctaatggcattgaaataattttaattactttcatttccttagtgcagggggaatgccgtgctgcaccaggccacgggaaatactagatttggttaggaggcagaggcatgactgaagggaaagcatatatcagagactgtattggggttttggcaggaaaggcatgcagggtgggatgaggagcttaaaactcagtggtttgcataagtctggcagccttagggctaagagattatcccttattgtgtggtgacagggcttgtgttgattaggacaggagaaataatcatgtatgagcattagatagtggttcagcatatgggatctggatcgcaagggaaatgtaaaaacattggctgttagtttggccctccaattcttagattttaagtagataaatacagatctaaggaaacacagaataagaagttgttcatagactgaagtgtcataattttggcaggattgtatggtctttgaggatgtggccatatatttctcccaagaggaatgggggatccttaatgatgctcagagacacctgcacagcaatgtgatgttggagaactttgcgcttttgtcatcagtaggtaaggccttcatacctactctggtgtcttgtgctgggtgctgtttttttgctcttttccatgacaactctgtctttcccacaccagattgtgagtgctacgtcctgtcctctcctggtttcctggcaaatgtgataaggcagccagagctgggctgtgtatactgtaccacctccccttaagcagccccagcttctgttgctctgaaactttacaagataaggctcggaagtcagaaatcttcaggtttctttaagatatcctaatggcggtgcctgtccctggtttgattactctgtccaaatgtgtgaaacctctgtccaagggtttccctgttccccttgctgacatacttggagacagtgtctgtgctaggaatttcaggcacctccctggtcaccacttgtgaggattgtgaagttatttctgcaggacgctctactgggtgttctggtagctttagaatgcagcatgtcctgggtttattgctctgtgtacatgctgtcccctccctttccctgcctttcccgtagctggacttatgccgcagctagatagttgctcaccttgagcaagggggaggtctctgggtgcctggcagagtggatagtcctctattaatggcaagagacactcagaaggacttggccctggtgggtgaaagctgggaaaggatgtgatatcaaggctgggttcaaatcacattgagaacttaccttgtgaccactattgtttgatgcagggccactggccactcgtcactcttcctttccttccctgttgttatttttactctgacttctgacccctggcttccacctctgacccctcctctccagccttcatctctccaccattctcttccacctctccctttgcagtgctgtctaatgtatgacctgtactttaggtgttatgaggtctgcgtgtatccttcagtagtccatgaatactcgctctcacacaatcagatctctctggatctggacacaaccgtcatggcctgttgaaagccatttatagaggagtgagttggagaccccacctgccctccctgcatggtacttctcccttgtgtccttaccaccaggattcccccactacacacacttcacaggcccacctctgaacactgggccttcctctcactggccttatttccttgcctgtgaccagtcctgtgccctcatttgtgggtgtgtctcacagacatttgtgatggggctgtctcctccctccggagttcacgtgcacttcaccagcatttctgttcttacaggttgttggcatggagccaaggatgaggaggtaccttccaagcagtgtgtttctgtaagagtgttacaggtcacaattccaaagccagctttgtccaccctgaaggcccagccctgcaagatgtgtagctcaattctgaaggacattctgcacctggctgagcacgatggaacacaccctgagcaagggctgtacacatgtgcagcagagcatgacctgcaccaaaaggagcagattagagagaagctcaccagaagtgatgagtggaggccttcatttgtgaaccacagtgctcacgtgggagagaggaacttcacatgcacgcagggtggcaaggattttactgccagctcagaccttctccagcaacaggtcttaaacagtgggtggaagctgtacagggatacccaggatggggaagcctttcaaggtgaacagaatgatttcaactccagccaaggtgggaaagacttttgccaccaacatgggctgtttgagcaccaaaaaacccataatggggagaggccttatgagttcagtgaatgtggggaattgtttaggtacaactccaaccttattaaatatcagcaaaatcatgctggagaaaggccttatgagggcactgaatatggaaagacctttattagaaagtccaacctagttcagcaccagaaaattcacagtgaaggctttctttcaaaaaggtctgaccccattgaacatcaggagattctcagtagaccaacaccttatgaatgcacccagtgtgggaaggcctttcttacacaggctcatctggttggtcaccagaaaacccatactggagaacagccctatgaatgcaacaagtgtgggaagttttttatgtataactccaaactcatcagacatcagaaagttcacactggggagaggcgttacgagtgcagtgaatgtgggaaattgtttatggacagcttcacactcggtagacatcagagagttcatactggagaaaggccttttgaatgcagcatatgtggaaaattctttagtcaccgctccacactcaatatgcaccagagagttcatgctggcaaaaggctttataagtgtagcgaatgtgggaaagcctttagcctcaaacataatgttgttcagcatctgaaaattcatactggagaacggccttatgagtgcactgaatgtgagaaggcctttgttagaaagtcccacctagttcagcaccagaaaatccacactgatgcattttcaaaaaggtctgacctcattcaacacaagaggattgacattaggccaaggccttatacatgcagtgaatgtgggaaggccttccttacacaggctcatctggttggtcaccagaaaatccatactggagaacggccttatgaatgcactcaatgtgcgaaggcctttgttagaaagtcccacctagttcagcatgagaaaatccacactgatgcattttcaaaaaggtctgacctcattcaacacaagaggattgacctcaggccaaggccttatgtgtgtagtgaatgtgggaaggccttccttacacaggctcatctagatggtcaccagaaaatccagactggagaacggcgttatgaatgcaatgaatgtgggaaattctttttggacagctacaaacttgttattcatcagagaattcacactggagaaaagccttataaatgcagcaaatgtgggaaattctttagatatcgctgtacactgagtagacatcagaaagttcacactggagaaagaccttatgagtgtagtgaatgtgggaaattttttagagatagctacaaactcattattcatcagagagttcatactggagaaaagccttatgaatgcagcaactgtgggaagtttcttagataccgctctacattcattaaacatcataaagtttgcactggggagaagcctcatgagtgcagtaaatgtagggaattgtttaggactaaatcgagccttattatacatcagcagtctcacactggagaaagtccttttaagttaagggaatgtgggaaagacttcaacaaatgtaatactggtcagcgccaaaaaactcacactggagaaaggtcttatgagtgtggtgaatccagcaaagtgtttaaatacaactccagcctcattaaacatcagataattcatactggaaaaaggccttagtggagtgaatgcaggaaagtcaccaaaactgtcacctcattcagcaccaaaaggttcacatcggaccaagaacctattaatatatgtaaatctaatgttgaaagagttcagatggaaatctgcgaggatttcctgctgggaactacattaaaaacatttatgtccaggcgtggtggctcacgcctgtaatcccagcactttgggaggcagaggtgggtggatcacctgaggtcaggagtttgagaccagccgggccaacatggtgaagccccatctctactaaaaatacaaaaattagctgggcatggtggcaggtgcctgtaatcccagctattcaggggactgaggcagggagcatcacttgaacctgggaggcggaggttgcagtgaactgagattgttccattgcactccagcctgggtgacagggcgagactctgtctcaaaaagaaaaaaattataattgtggcaaattacaggtaacttaaaatctaccatcttaacccatatttaactgtactgttcagtagtgttaagtcattcgcattgttgtcaattaatatccagaagttttttcaacttaatgaaactaaaacattataccctttaaaccaggggtccacaacccccaggctgcaaactggtaccagtctgtggcctgttaggaaccgggccagcatcactacctgagcttcacctcctgtcagatgagcagcattagattctcatagcagcctgagccctattgtgaactgtgcctgtgagggatctaggttgtgtgctccttatgagaatctaactaatacctgatgatctgaggtgggacagttttattctgaaactgtctgccccctcctctgtccctgatgcgtggaaaaattggcttccatgaaaccagtccctggtgccaaagaggttggggaccgctgctttaaactactcctcttcctcattccctacgccaaccagcccctgacaatactactgtatgaattttactataaatatctcatatgaggaaacttaagttttagtcttttgtgacttattttgaggcttatttccctaaatgtcttcaaggtttatccatgttgtagcatagcttatgattttcatcttttttaaaggccgaataaaatcccattgtagtcatgtgtcgcctaacaagaggactgtgttctgagtaatcatcttaaggtgattttgtcattgtgtgaacaaagagtgtacttacacaaacctgaagggcacagcctattacgcacctaggctatatgatatggtccattgcgcctcagatataaaccttaacagcatgttacagtattgaatattgtaggtaattgaaacacaatgataagtaaatgtgtatctaaacatatctaagtttccaaaaggtactgtaaaaatgtatgaaaaatggtaaaaactttatagggcactaacatgaacgaagcttgcgggacccctctggttgagtcagggagtgagttgtgagtgaatgtgaagctctaggacattactgtaccctattgtagatgttataaacattgtacacttaggctactctaaattaattttttctttagtaataaattaaccttagtctactgtaacgtttttacttcatgaacttttaaaattttaaaaagctttttgactcttttgtaataatagcttaaaacacaaacacattatacagcctgtatagaagtactcctttatattctataaactttttctatttaattttttaacttcgtaaaaaataagttaaaaatgaagacacagacacacacattagtcaaggcctacagagggtgaggatcattaatatcactgtcttttgcctccacatcttgtcccactagaaggttttcaggctcaataacagggagttgttatctcctatgataacaatattctggaatattttctgaagccttgcctcacactttttttttttttttttttttgagacagagtctcgcactgttgccaggctggagtgcagtggcacaatctcggctcactgcaacctctgcctcctgggttcaagtgattctcctgcttcagcctcccgagtagctaggattacaggtgcctgccaccacgctcagctaattttttgtatttttagtagagatggcgtttcactatgttggccaggctggtctcgaactcctgacctcatgattcgcccgcctcagcctcccagagtgctgggatgacaggcatgagccaccgcgcctggctttattttttttttgagacagagtcttgcactgttgcctgggctggtgtgtagtggtgtgatcttggctcactgcaacctccgcctcccgggtacaagcgattctcctgcctcagcctcccgagtagctaggattacaggtgcccaccagcatgcccggctaattttttgtatttttagtagagatggggtttcactatgttggccaggctggtctccaactcctgacctcatgatccgcccatctcggcctcccaaagtgctgggattacaggcatgagccacagcgcccggcctgtgctctttatatgactggcagaccagtaggtttgtttacaccagtgtcaccacacacacttgagtaatgggattgagttacagtggctgtggtggcactaggtgataggagttgtttagctctgttataatacgggattactgttatacatgtggtccatggtagacagaaatgtgtggcatatgactgtggtatatgtatatgccacttttcctgtattctttcttcagtgtacatttgggttgcttccactcttctgttcttgttaatgccactatgagcatgaatatacaaatacctcctgaggccctgctttaaattcttcttggacatatacccagaagtggaaatggtgcttcccgttaataataataattataataataataattattattattattttgagacggagtcttgctctgtcacccaggctggagttcagtggcacaatctcggctcactgcaagctccgcctcccgggttcacgccattctcctgcctcagcctcccaagtagctgggactacaggtgcccgccaccacgcccggctaattttttgtatttttagtagagacggggtttcaccgtgttagccaggatggtcttgatcttcctgactttgtgatccatccgcctcagcctcccaaagtgctgggattacaggcgtgagccaccacgcctggccacttcccgttaattctattttaaattgtggggggaattattttccatagcagctgcaccattttacattctcaccagtgcaggggttctagtttttcacattattgccaacactttgttttttaatcatgatgggtgtaagatgttattttattatggttttttaatttgcatttcagtattggtgttgagcatcttttcatttgcttgttgactaattgtataggttctttggagaaatatctgttaaatgtctttgcccattgaagaaagtttttgtaaattttcagataacattgtatgcttttgttgtgtacaacatgatgtgaagtatatatactttgttgagtggttaacatgtacgtattatatatgtacatattctgtatacgtattttaaatattaaccccttgcagatatgtgtttttcaaatactgtctaccattcagtctgcttccttttcattctgttcatgtcttttttttttttttttgcacaggagttttcaaatttcaatggagtccaatatatgttatgtttgtttcctatgcttttggtattatacccaagaaattattgctaaatccagtgtcatgaaccttttttcatgttattttctaggagttttatagttttaagttgtacttttatgtctgatttatttcagtttgttttagtaaatggaggaaggtaagagttcaacttcattcttttgcatatagatatccagctttttgaaagtcatttgttgaaaagactccttaataagtttttgcgctcttgtcaaaaatctgagcataagtatgaggacttccgtctggcctctttattccactatatgtatgcatttgtgctagtaccaaggtgttttgatacataattcttttaaaagaataatgtttctgtccactgttgaggcccttgctagaggcttgacagtgctacatttggaacagctgattaagtacacttccaaccactttccttaacaggctgtcaaactctgggtcaatatatatcagccccagtcaccccaggagcaggtatcagacatctggggacaactcctatgccctgaaatgtgtaaaattactcaaattggccaagtatagaaagcccagaaaatctagctaacccgaatccacttgccacacacaagctgcctcctacaactccagtttgctgtattactatctatattccttcacaactccggtgcagccctgaatcatgtcctctggttctgagttgtaagttacaacatgctccacctttcatctatctgtcatgtcatgtcctgacatcaagaaaacttctaaatcttaaaactacatacccagaagggtatcatgagtgcagcgaatgttggaaagtcttcagccattaacctcattcagcaccagtaaaccatcttggagaaagaccttaggaatgcaggcaggcaaagtgcttttgccagcagataaaatagtaaagctgtggatattagcttttgtgagggagacctcaaccagaaatggaatcttacatccaaacatccacacaagggaggtttgttgtaattgtctgctatatgagaagcttttgtgaattaccttgcactttctgacctgcctgggatccttgccagtgttaagtcactgaaagtgtgtactacaaaagacttccatccactattagctgatatcacagtgtgtatcaccttaaaatgcttagggagggcagatagctgtgctctctacctttatctggagttattgagtctgatcccttcgggcgaggcctcattcccacttccatggctggtttgggtgcagacatcatccaactttggacagaggatacaggctggcttgagctggcagcttgtaaagattttcctttcttcatgggtattattgcttgtcttataatgttggtgatagatttttcaccttccaagctgcccaaacccagtcaatttccacgtgactatactggttttagtgatgataaagtcattgtttaagctacatttactcattgcagttttattctctgtgtgctgtgggttgagagcaaaattggagtctgccaaaatgaaaaagtgagtggttttgtgaggttttcaattttatgtacttccaaggaaatagcaaaaacaaaaaaaccaaaaaaaaaaaaaaaaaaacaactcaatccacaaacgcctgatgtatattgcttcagaaggttcctgggaaaaagaaggatttctatccaaaatcctttaccctgaatttgaagattatttatggttgcacagtcagcttgcagccaggacaattggtttgacaactgtcaggatttatggcagctgtgagagctgggtatttgtacccatgcatgtcccatattctccagtattgtttagggatagcttgctcctgtgatgtgccttatgagctatgtgtcttgaacccaaaaatgatgtaggttatgttcctggatgtaaaatgtaagagtgcattagtttgttgtccattgcttataaaataatacctgaaactgggttatttataaagaaaaatctatttcttacagttatggaggttgaaaggtccaaggttgagtggccgcatttggtaagagccttcttgctggtagactgtgcaaaaagtcccaaggtggtacagggcatcacatggtgaggctgctgagtgtgctcacatgttaacgtgctagcgcaaatcattctctctcttttttttttttttttttgagacggagtttcgctcttatcgcccaggctggagtgcaatggcgcgatcttggctcactgcacctccgcttcctgggttggctcaccgcaacctctgcctcccgggttcaagcaattcttctgtctcagcctcttgagtagctgggattacaggcatgtgccaccacaccccgctaagtttttatttttagtagagcagggtttctcccatgttgatcaggctggtctcgaactcctgacctcaggtgatctgcccgccttggccccccaaagtgctgggattacaggcaagagccacggcccctggccctttctcttcttataaaaccaccagttctcccaggataacccattagtctatcaacccataaattgattaattcattcctgaggatagagccctcatgattcaatcacctcttaaaggtcgcacctctcagtactaccacactgtagattaagcttcaatgtgacttttggaggagatggtcaaaccatagcaagcagtttgggaaccatagtctgtacagaaacagtgattgtattaatatgaagtatgagacaccagcaaactagagtggaatggatgagcgccttgtaaagagacatccatgaatgtttcagtaactatggctatgtgagatgagggtatacagaaactctgaggacctacagacgtgtgtatctcctgtaggcaaagtcattgtcagagcaagtaatccaaaggtgttatggattcttgtgtctctggcgttataaaacgtatgttgaattttaattgccattttaacagtgtggagaaatgggacctttaagaggtgattaggtcatgatggctctgcccttataaaggaatcaatgcctttatcataagagtgggtttgttaacccgagagtgacgtttttataaaatcagctgtctctgtctttcatgctcacttgcccttctgtcatattatgacagagtaacaaggccctcaccagatgccaagcagataccagtgccatacccttggacttcccagcctccagaactgtatgaaacaaactactttataaattacgcaatctgtggtgttttgctatagtagtggaagacagacacagacataaagcctgttaattcaaaccactactgcacaggtaggagcctcatgactgaatgaagggagattctatacttctgagataagtcttttttttttttaaacctaaacataattcctggtgactcaggtggacataaccttccttgtctccagttcttcttccccgagattctgaatttccaacaacattgcttccagtttttgatactataaaatcagagttgacccacgtaagacatgaggagaggctaatgatggaatcaacacagctttgccagaggttataaaagaggattgagaaatccagattttatttggaatttttcttttctaacagctttattgaggtattagtgacattcagttgcacattgttaaagtgtaaaatatataaaaacaatcaccaaagtcatgataataaacatatccattgcctcaatagtttgtttgtacccttttctattctctctcgctcacagtcctacccaaatttttatgctcaggtagccactggtttactttatgtcactatatacatctttccttccttccttcctccctccctcctgctcttttctttttccttttttcttttcttttttctttgtttctttccctccctccttctcttctcctctcctctcctcctctcctcctcctctcctctcctctcttctcttctttctctttctcagaatttcactcttgttgcccaggctggagtgcaatggcacgatctcagctcaccgcaacctccaccttctgggttcaagcgattctcctgcctcagcctcctgagtagctaggattacaggcatgcgccaccacgcctggctaattttgtatttttagtagagacgggggtttctccatgttggccaggctggtctcgaacgcctgacctcaagtgatccacctgccttggcctcccaaagtgttgggattacaggcgtgagccaccatgcccggcctataaattttctagtatcttatacaaatgaaatcctacattacattcatatggagcattttttgatatttatacatgttaagcgtattcattttttgttgatgaagagtattgcattgaatataccacaatttattaatctattaataaatattttgattgtttctagtgttggactaaaaaactaacaaagacccatgaacattcatatacaagtgtttatatgaatatatttagcagaattgcatttgttatacctccttgtccatgatggttatggtgtattttaaagattaaccattttcatagatgtgttgtggtcagtgtggtttttaaatttgcatttctctaataattaatgatgctgaataagtttttatatgcttatttgttatctgtatatttggccaaatttctaaatcttttccctttttttaaaaaaaaatcttatttttctattttaatagagttttaattttagaacattttaagatgtacagagaaattgcaaatatagtacagagatatctcatttacaagcacacctagttgttactaatatatagtcatatattagtatacagcattatttacaattagtgaaacagttttgatacattattaaactaaagtacatctttgattgagatttcctcagtttttaccaaaatacatgttctgttccagaattccacctaggataccacattgcatttattttattattttttattcttttatttattttttttcatgtgtctctaaatgtaaccacattacagttagtactcacatttctttaggcttgtcttgcttatgagaatactcatttattttgatattgatttttaatttttttttttttagatagtcttgctctattgtccaggctggagtgcagaagcactttctttctttcttttttttttttttttttgagacggcgtcttgccctgtctcccaggctggagtgcagtggtgggatctcgactcactgcaacctctgcctactgggttcaaggattctcctgcctcagtctcctgagtagctgggattacaggcacctgccaccatgtctggctaatttttgtatttttaatagagatggggtttcaccatgttggccaggctggtcttgaactcctgacttcaagtgatctgcccacctcagcctctcaaagtgctggggttaccggcgtgacccacggtgcccagccacttttagttatttttatttttattttgagtctccctccgtcacccaagctggtaagtaattctcgtgcttcaccctctggagtagctgggactacaggtgtgtgccacatggttggctaatttttgtatttgagacagggtttttgccatgttggccaggctggtctcgaactcctggcctcaagtcatcttgagtggatcacttgaggcatttgggagtgcctcagcctcccaaaacggtgggattacaggcgtgagccactgtgcccggcctgcacatgtctttcttacatgtggactctccaggggatttatgctgttcaagaagcacctgaatcaaactgtgctttaaaaatatttttaaaacattccatgattcttcatagtacaaaaatgagaaatctcccctaaatctctaaagaattccctttttaaactttttgatttcctgaacttgtctgaaggacttaacacagttatatagagtgttctttgtgtaacagtatccatgactttcatttttagctctggtattagatcttcctggacaagagcattactggccatgtgtatgttgctatcacaaataactagtagttaatatttcctaaatcttagcaagagttatgataaatagctgaattccatgaagagaaaagactcatggcatgacaaccagattaggaaagagtgttttccttgtcctgcaggcaaaacagaactgagagatatgagtatcactcatgatgaggacaaaagggctgcgtgctgggaaacatgaggcgaccaacacagagttggtcactatccactggcctgggtttgcaactacagttgtccaaattgtcagaaaactatggactgaatagaaaacaaaaaaggagctcaccaggaccatgatggtgtgtgtggctctggcttcctgggaaggtctgcaggagagtctgttgctgtgattgtgttggacttgctgcttgtgtctgtagaggaagaagaccatggagccactggcccagaccatgaagcccaaactcataaaatcaggggaaaaatataagactgcatgtaatgagctaaatctctttgatgctttgtaagaacagtatccataattgttttttgcactactgtttttgctattcagtgggccattcactaatagaagaacagatgcattcatcaagacatggggggcccagcagaggagacaacagaagtcaataaaccttggggatctaatcttgatctccatccacctgcatatactggggttgagcttaatggcttggaatccattgagaaggcagatggtgctgagggaaactcttgtgcccaccctgtgataataaaagacaaacttacatccagtgtcattcagcaaatatttcaatccaaaagctgccattgtctgaggtatccctttaaagaaaaggaccatggagttagccaaggccagttggctgagaatcaagtccgtgggtctcagcttgtgtccagtgaacaaaattaagttataaaaacaaaggagaaaggaatttcccaggatcccaactccagtctgaatgaggaagctaatccctgattttacttttccaaaagccatttcatcaaaatctaggggatgttgattttcattgaggtctgaagaatcagtagaataaaaaagcagaaagaagtatcttgtcatcagtggagacagaagttttaatgtgtctccaaccatattttctcatcttaaacagaaattaagattgtccctgttcgtgcaaaggcaattgcttgtgtgtccaactgcagagaagcaggtgaatgaatgagggctcaaccgcacaacagatccacaaatcaaacctataaaactcagggcttacacacatgcaacaagtaaatacaagcaaaactagggaaatatataaaaacagaacacagaagagtcaatatcattagagtgatattatactatagtttgcaaaatgtaatcatgacggaaccctgggtaatatggacagggctttttctgtattatttcttatgactgcttgtgagtctacacttatttcaataaaaccttcaattaagtagcctggagatatgaaaagcaaaaataatacaccataaaaccttttccacactaatattttagtaaacaccattgttattgatgcattgaaacaaattttaggccgggtgcagtggctcacacctgtaattccagcacttcgggaggccaagatggagaccatcctggccaacatggtgaaaccctgtctctactaataatacaaaatactaataatacaaaaattagccgggcatggcggcgcgtgctagtcccagctactcgggaggctgaggcaggagaatcgcttgaacctgggaggcagaggttgcagtgagctgaaatcaaaccattgccctccagcctgggcgacagagcgagactctgtctcaaaaaaaaaaaaaaaagaaattaaaaaaacgctacaatacaattggtaacaaggccttcagcacagtacaaatgctaacttgaagaatttttaaaaactataatttttggaacaatcaacattgcatcatggtatattttattttaagcacatatatttctgttattttccaccggacaggtctagagattgtgaattgactccgtagaaataaccatgaccaccttgagcccacacatttttatctcaatgccatttctcacaagtaaatgcaaaagatcctgaaaataaatactaatcccagaaacacctaagatatccttaaaacttgttaaataggaaattcaatatgttccagaaagcttgggtttatttttagggaaagataattcaattgggagggaatttcattgcacaatattcatatatatcaatcacaaaagaaatagtaactgcggccaggcacggtggctcacgcttgtaatctcagcactttgggaggctgaggcgggtggattacaaggtcaggagatggagaccatcctggccaacatggtgaaaccccgtctctactaaaaatacaaaaattagctgggtgttgtggtgcgtgcctgtagtcccagctactcgggaggctgaagcctcctgggttcacgccattctcctgcctcagcctcctgagtagctgggactacaggcgcccaccaccacgcccggctagtgtgtgtgtgtgtgtgtgtgtgtgtgtgtgtgtgtttagtagagacggggttgcaccgtgttagccaggatggtctcgatctcctgacctcgtgatccgcccgcctcggcctcccaaagtgctgggattacagggatgagccacctcgcccggccataatttagattcttttggtgtctctatggaattgctatcatcagggaaaattatgaggtattttctcccatgaataactacatctctttaggggtggagcaatcaataacacagcagtatcaagattctcaggcgagaggtggctcacgcctgtaatcccagcagtttgggaggccgaggctggtggatcagctgaggtcgggagttcgagaccagcctgaccaacagggagaaaccccgtctctactaaaaatacaaaaattagtcagaggtggtggcgcatgcctgtaatcccagctactcgggaggctgaggcaggagaatcgtttgaaccccagaggcggaggttgcagtgagccgagatcatgccattgcactccagcctgagcaacaagagtgaaactcggtctcaaaaaaaaaaaaaaaaaactcaggctctgaggtatgaaaaccttttagattcccacaaaccacttgttgacaaatgtttttcctatttatatgaactcatcatttattttcaagatagttcctgattctttgctttaatctcttattttgctccattgtcctagttgtataatttatttccaatatgcatttggtttcctattttttcagcttctccttataaagtaccatttttactatgactattttgaaagcttcttgtatgtataaagttagtgtgattattgactttaacataccacctccttctcctcctagcctcagaaagaagtgttggtaactggtgagaattttcagacagattttcctttttttttttaatttaatttaatttttttttctttctttgctttcttttttttttttttttgagacagagtctcactctgttgcccaggctagagtgcagtggcgctatctcggctcactgcaaactccacctcccacgttcaagcgattcacctgcctcagcctcctgagtatctgggattacaggcgcctgccactgcgcctggctaaattttttttgtatttttagtagagatggggtttcaccatgttggcccggctggtctcgaattcctgacctcgtgatccacccaccttggcctcccaaagtgctgggattacaggcgtgagccaccgcgccaatttaatttaattttttaaagttccaggatacaggtgccggatgtgtaggtttgttacataggtaaacgtgtgccatggtggtttgctgcacctatcaacccgtcacctaggtattaagctcagcatgcgttagctatttatcctgatgtgctccatcccccgacccctttgacatattccagtgtgtgttgttcccctccctgtctccatgtgttctcatcgctcaactctcacttataagtgagaacatttggtgtttggttttctgtttctgtgttagttttctgaggataatggcttccagctccatccatatccctgcaaaggacgtgatctcattctttttatggctgcatagtattccatggtgtatatgtaccacattttctttatcactgatgggcatttgggttgattccatttctttgctattgtgaatagtgctgcaatgaacatatacatgcatgtatccttataacagaatgataataatagaatgatttatattcctttggatatatacacagtaatgggattgctgggtcaaatggtatttctggttttaggtctttgaggaattgctacactgtcttccacaatggttgaactaatttaccttcccaccaacagtggaaaagcattcctatttctccaccaccttgccagcatctgttgtttcttgacgttttaataacagcccactgaacagcaaaaaccttagtgtgaaaaacaattatggagtctgctcctgggcaatgcaagaaatatttggcaccttatatacaattatatacttttctcctgactttttgagttttggcttcttggtgtgggtcagtggctccatagtctttgtcctatacagacacaagcagcaagtccaacacatttgtagcaagagactctcctcaaatcagtataagtaaaattaggaaaatattaagatgatagtgagggccgggtgtggtggctcatgcctgtaatctcagcactttgggaggccgatgcaggcggatcacgaggtcaggagatagagaccatcctggctaacacggtgaaaccccgtctctactaaaaatacaaaaaattagccggacattgtggcgggcacctgtagtcccagctactcgggaggctgaggcaggagaatggcatgaacccaggaggtggagcttgcagtgagccgagatcgcgccactgcactccagcctgggcgacagagtgagactccatctcaaaaaaaaaaaaaaaagatgatagtgaatatatcaaaatcaatatcatcattgtgatattatactgtaattgccaaatgtaaccatgggtggaaactgggccatgtgtagaggctctctgagttattttttaaactgcttgtgagtctaaaattaaattaaaattattgttaataaaatggtcagtaaaaatgctcaggaatatgtaaggcaaaaataaggcattataaaaccttgtccgtcattatgttttaatacacatctcctcacatacttatcatttctttctgatgagaacatttaaaatctactcttttggcaattttggaatagacattaacaatagtcaccacgccgtgcaacagatcactagaacacattccttgtgtctaactgaaacttcgtatgctttcacaaaaacctcccgtttttcagtttgccctctatctctttagcctctggtaaccaccattctactctctacttttataaactcaacttgcctaaattctgcatacaagtgagaccatgaccatgtggtgttggtctttttggactttctttgaatgtgtcctgccttcagagatgtgttgacctacaagaaaaatgtattgaagcataccactataatgtgtgcacatttctgaatgtcatgtataagatacctatttttgccactcctattcagtatagtactagaggtcctagccagagaaatcaggcaagaaaaatacctagctaactaaataaaagatattcgggtgagaaaatataaagtaaaattgtttttctttgttgtaatatgatcttataaactcttagaactggggaacaaatttaatatagttgtaagacacaaaatcaatatacaaaaatcagtagcattgcggtacaccaataatgaaatagccaaaacagaaatcaagaaggcaattccatttgcaatagctataaaaagcaaaataaaataaaatagaacactgagaaatatttaatcaagaggggaaagacatcaaggaaaactacaaagcattgataaaataaactgaagaggacacaaacaaatggaaagacatcccatgctcatgtattcaaagaatacatattgttaaaataacagacagtactacccaaaacaatctaaagatttaatgcaagcccaatcaacatacaaatgccattttttcacagatatagaaaaaaattctaaaatttgtatggatcttcaaaagagcccaaatagccaaagcaatcctgagccaaaagaacaaacctggagcatcacactacctgacttcaacaccttacacagccatagtatccaaaacagcatagtattggtattttgtttttgttttttgagacggagactcgctgtgtcgcccaggctggagtgcagtggcgccacctcggctcactgcaagctccgcctcccgggttcacgccattctcctgcctcagcctccccagtagctgggactacaggcgcccgccaccacgcctggctaattttttgtatttttagtagagacggggtttcaccatattagccaggttggtcttgatctcctgacctcgtgatctgcccgtctcggcctcccaaagtgctgggattacaggcgtgagccaccgcgcccggcctaggacttctttttaacatatgtgtt

SEQ ID NO: 336 - DNA, 3236 bp, Homo sapiens
ctccaccgcggcgagaggcatgggcacgtggctgccgagggtggccgagctctgggaagaaaagcccgtgtgcctctgcatagcgtcgctacagcgctgactcggtgtggattgattggaaaggtttgagggagtacttgggaagcatggtggcacatgatgagactggaggtctcctacctattaaaaggaccatacgagtcctagatgtcaataaccagtccttcagagaacaagaggagccaagcaataaaagagttcgacctctggctcgtgtcacgtccttggcaaatttaatctctcctgtaagaaatggagctgtcagacgttttggtcaaacaatacagtcatttacccttcgtggtgaccacagatccccagcctctgcccagaagttttctagcaggtcaacagtcccaacacccgccaagagaaggagcagtgcactgtggtcagagatgctggacatcaccatgaaggagtctctcaccaccagggagatcagacggcaggaggcaatatatgaaatgtcccgaggtgaacaggatttaattgaggatctcaaacttgcaagaaaggcctaccatgaccccatgttaaagttgtccatcatgtcagaagaggaactcacacatatatttggtgatctggactcttacatacctctgcatgaagatttgttgacaagaataggagaagcaaccaagcctgatggaacagtggagcagattggtcacattctcgtgagctggttaccgcgcttgaatgcctacagaggttactgtagtaaccagctggcagccaaagctcttcttgatcaaaagaaacaggatccaagagtccaagacttcctccagcgatgtctcgagtctcccttcagtcgaaaactagatctttggagtttcctagatatccctcgaagtcgcctagtcaaataccctttactgttaaaagaaattcttaaacacactccaaaagagcaccctgatgttcagcttctggaggatgctatattgataatacagggagtcctctctgatatcaacttgaagaaaggtgaatccgagtgccagtattacatcgacaagctggagtacctggatgaaaagcagagggaccccagaatcgaagcgagcaaagtgctgctgtgccatggggagctgcggagcaagagtggacataaactttacattttcctgtttcaagacatcttggttctgactcggcccgtcacacggaacgaacggcactcttaccaggtttaccggcagccaatcccagtccaagagctagtcctagaagacctgcaggatggagatgtgagaatgggaggctcctttcgaggagctttcagtaactcagagaaagctaaaaatatctttagaattcgcttccatgacccctctccagcccagtctcacactctgcaagccaatgacgtgttccacaagcagcagtggttcaactgtattcgagcggccattgcccccttccagtcggcaggcagtccacctgagctgcagggcctgccggagctgcacgaagagtgtgaggggaaccacccctctgcgaggaaactcacagcccagaggagggcatccacagtttccagtgttactcaggtagaagttgatgaaaacgcttacagatgtggctctggcatgcagatggcagaggacagcaagagcttaaagacacaccagacacagcccggcatccgaagagcgagggacaaagccctttctggtggcaaacggaaagagactttggtgtagagaaggctctgtgtgttaactgatgggagagactgtttgtttataaatgtgtacagttttgttttctcgtaaggggagcatcatagggttactttataccagttgtaacattttcattgtttttggttgttcttttttctttttttaatggcagctaaagatatacagattactgttaaattgcagtcctttttttttttaaagatattttcttgaattatttagaacatggtaagcctggtattttttaatcaaacaaaatatttatgaaatgggttttctcttaattctggattcatcatggctttctaataccaattgtaatatttacaatattcaccaaaacttagaattttgcaaatgctggaattctgccagtgtttctttgctaagccttgcatgcaaaatttgaaattttaacattggcacccaaaacctacatggaatgtatgtctggagtatttcaaactttacattgaaacataatttccttggaaaacaaaccataagcctgaggaggtttttatcaactggaatgctttatattagtttgtttttcactgtacattcctcattttacattcatttaacctgccgattatttaatttttttattgtaaagtagtttttagcatttgcttttatttttttactttgatgccttttcaaattggcatgtctttaaagtatttttcttcctgattaaaaatgtgtgtgtatgtgtgtgtgtgtgtgtatatatatatatttttttaaatcacattaattttaccaagtgaaaccaagccatactgtttttgagccaattaagaaaattgccatttttaaagtgtagcatttcagggtaaagacccatgaaatggcttgatgtattctagactactgaaagaaaaccacttcaaagattttgttgaaagttttagtgttgtctgaaatgcaagagggaaggtgattggtagtgagttaaaagaaaaagagaggaaaagagagtagttttgtcttcaagtaaaatgtctggttgtgccagacatttcacaagtgtgaaaggagataggagaagctcaacttgagggcgtgtagtaagttgtagaaggctcgaggggacgtggacttatttgccttggtttgcaatacctgcaaataatgagtttgaaaagaaacaatgaaatgtgttaaaaatttgaccatattagataaattttggtggatttagtcataagatggaaaaagactggtgaatcttttattacaaaatgtttctgttaaaatgggatcatcatctttgaaaggggggaggaggagtaaaagcccgattataatggtgatcaattcaagtcagtgttgactattctgtgaaatatatttggccagtggaaatgataatcagaaaagactgtaaatagatccatccaaatgatttctctgtacaaatgaatgatactattaaaaaaaaaaaaaaaa

SEQ ID NO: 337 - DNA, 794 bp, Homo sapiens
ccagagcagagtcagccagcatgaccgagcgccgcgtccccttctcgctcctgcggggccccagctgggaccccttccgcgactggtacccgcatagccgcctcttcgaccaggccttcgggctgccccggctgccggaggagtggtcgcagtggttaggcggcagcagctggccaggctacgtgcgccccctgccccccgccgccatcgagagccccgcagtggccgcgcccgcctacagccgcgcgctcagccggcaactcagcagcggggtctcggagatccggcacactgcggaccgctggcgcgtgtccctggatgtcaaccacttcgccccggacgagctgacggtcaagaccaaggatggcgtggtggagatcaccggcaagcacgaggagcggcaggacgagcatggctacatctcccggtgcttcacgcggaaatacacgctgccccccggtgtggaccccacccaagtttcctcctccctgtcccctgagggcacactgaccgtggaggcccccatgcccaagctagccacgcagtccaacgagatcaccatcccagtcaccttcgagtcgcgggcccagcttgggggcccagaagctgcaaaatccgatgagactgccgccaagtaaagccttagcccggatgcccacccctgctgccgccactggctgtgcctcccccgccacctgtgtgttcttttgatacatttatcttctgtttttctcaaataaagttcaaagcaacaaaaaaaaaaaaaaaaaaaaaaaaaaaaaaaaaaaaaaaaa

SEQ ID NO: 338 - DNA, 1421 bp, Homo sapiens
cgggttcgtgaacttcccggaggcgcaatgagctgcattaacctgcccactgtgctgcccggctcccccagcaagacccgggggcagatccaggtgattctcgggccgatgttctcaggaaaaagcacagagttgatgagacgcgtccgtcgcttccagattgctcagtacaagtgcctggtgatcaagtatgccaaagacactcgctacagcagcagcttctgcacacatgaccggaacaccatggaggcgctgcccgcctgcctgctccgagacgtggcccaggaggccctgggcgtggctgtcataggcatcgacgaggggcagtttttccctgacatcgtggagttctgcgaggccatggccaacgccgggaagaccgtaattgtggctgcactggatgggaccttccagaggaagccatttggggccatcctgaacctggtgccgctggccgagagcgtggtgaagctgacggcggtgtgcatggagtgcttccgggaagccgcctataccaagaggctcggcacagagaaggaggtcgaggtgattgggggagcagacaagtaccactccgtgtgtcggctctgctacttcaagaaggcctcaggccagcctgccgggccggacaacaaagagaactgcccagtgccaggaaagccaggggaagccgtggctgccaggaagctctttgccccacagcagattctgcaatgcagccctgccaactgagggacctgcgagggccgcccgctcccttcctgccactgccgcctactggacgctgccctgcatgctgcccagccactccaggaggaagtcgggaggcgtggaggatgaccacaccttggccttctgggaactctcctttgtgtggctgccccacctgccgcatgctccctcctctcctacccactggtctgcttaaagcttccctctcagctgctgggacgatcgcccaggctggagctggccccgcttggtggcctgggatctggcacactccctctccttggggtgagggacagagccccacgctgttgacatcagcctgcttcttcccctctgcggctttcactgctgagtttctgttctccctgggaagcctgtgccagcacttttgagccttggcccacactgaggcttaggcctctctgcctgggatgggctcccaccctcccctgaggatggcctggattcacgccctcttgtttccttttgggctcaaagcccttcctacctctggtgatggtttccacaggaacaacagcatctttcaccaagatgggtggcaccaaccttgctgggacttggatcccaggggcttatctcttcaagtgtggagagggcagggtccacgcctctgctgtagcttatgaaattaactaattgaaaattcaaaaaaaaaaaaaaaaaaaaaa

SEQ ID NO: 339 - DNA, 1756 bp, Homo sapiens
ggcgggagagcggcggggccgagagcgtgactcgcccgctccgcgctgcttcccccgcgccgcctccccgcgccgctcgcgcagccatgtccgaggagaagcccaaggagggtgtgaagacagagaatgaccacatcaacctgaaggtggccgggcaggacggctccgtggtgcagttcaagatcaagaggcacacgccgctgagcaagctgatgaaggcctactgcgagaggcagggcttgtcaatgaggcagatcagattcaggttcgacgggcagccaatcaatgaaactgacactccagcacagctggagatggaggacgaggacaccatcgacgtgttccagcagcagacgggaggtgtgccggagagcagcctggcagggcacagtttctagagggcccgtccccagcccgggccgtccatcctcgcattgctgttgaatggtgagcacgtgaccatgccgaccacaaaggtgtctgcggaaactcgaggacattcaccacgatgattttcctctctttgatgtacttcaagtgcaactcaaaactatatctgcagggatgaatctgtaacttaaattgggccaatcagaattgttatctttgttcaggtaaaatgagttgcaagatattgtgggtacttttgtgtgctcatttgtgttttccccccctcctacaacatttttttaaccccaaaattatagcctgaatgttcgcttttagtctggccagggatctgactcctgagttggttgcctctcccctgctcactccagtcacatagagaattggtgtttcccgcagtggggatgcagctgttggacaggtattgggggcaaggttggtagggaggacagactgtcacttgctgttacaggcacaggtgattaaaatgctaaatattgcaaatttaagctttgtcagtatatggaaaagttgaagggaaaatactggaatgcttcttcaaaggttaaaaaataaccgagtcttttggtaatttgaccccacgtgctctctggccctcaagcatgtaacctcggggtctgaggcccaggacccacccccctgccacccctcccaccccactccctgctcagtacctggcgttggtacacaggcaaggattggcacaaccaaaattggcctttttctccctcttaatattgaagaaattcccacatttctcatttggtaatggtgttgtggcctcagatttcttctagtatttgcttctgatgaatgattatggtctatacataaaaaagtaagactaagtattgctgaatttgcagttatgttgtcgtgtataagagctacttccaagtgtggttacaaatgaacccatggaatgatgacttcatgttcttctcgtgggtttgtgccgtgctgctttccaaataggtattgaatttatgcattagtctggtgatttcagttctgtgaaatattttgggatctataccaattaaacattttcatagttctgcctattgtccttccctgaggctccattgctgcttggtggccattctctgcctttttacagtcacctgaacaatgacccatcatctcttgcttgcttgaaatcttgctgaaatgttctcatttcctgtttgctgtatgggctcgggtgggatgtttgttggctctgttgtgtttattcaccaatttgtacattatttgttgtcctttactactgtaaacagtaaatatagtttggtattctgtcaaaaaaaaaaaaaaaaaaaaaaaa

SEQ ID NO: 340 - DNA, 1133 bp, Homo sapiens
gtaatttaccaccatgtttggttcctgtttataagatgttttaagaaagatttgaaacagattttctgaagaaagcagaagctctcttcccattatgacttcggaaatcacttatgctgaagtgaggttcaaaaatgaattcaagtcctcaggcatcaacacagcctcttctgcagcttccaaggagaggactgcccctctcaaaagtaataccggattccccaagctgctttgtgcctcactgttgatatttttcctgctattggcaatctcattctttattgcttttgtcattttctttcaaaaatattctcagcttcttgaaaaaaagactacaaaagagctggttcatacaacattggagtgtgtgaaaaaaaatatgcccgtggaagagacagcctggagctgttgcccaaagaattggaagtcatttagttccaactgctactttatttctactgaatcagcatcttggcaagacagtgagaaggactgtgctagaatggaggctcacctgctggtgataaacactcaagaagagcaggatttcatcttccagaatctgcaagaagaatctgcttattttgtggggctctcagatccagaaggtcagcgacattggcaatgggttgatcagacaccatacaatgaaagttccacattctggcatccacgtgagcccagtgatcccaatgagcgctgcgttgtgctaaattttcgtaaatcacccaaaagatggggctggaatgatgttaattgtcttggtcctcaaaggtcagtttgtgagatgatgaagatccacttatgaactgaacattctccatgaacaggtggttggattggtatctgtcattgtagggatagataataagctcttcttattcatgtgtaagggaggtccatagaatttaggtggtctgtcaactattctacttatgagagaattggtctgtacattgactgattcactttttcataaagtgagcatttattgagcattttttcatgtgccagagcctgtactggaggcccccattgtgcacacatggagagaacatgagtctctcttaatttttatcttggttgctaaagaattatttaccaataaaattatatgatgtggaaaaaaaaaa

SEQ ID NO: 341 - DNA, 2178 bp, Homo sapiens
tgggatagcgcgagtgtccgcggccgagcagcagatttttgctgtgagaattaattaccagtaacagttcaatatgggggacattctggctcatgaatctgaattacttggactagtgaaagagtatttagattttgctgaatttgaagacaccttgaaaacattttcaaaagaatgcaaaataaaaggaaaaccattgtgtaaaacagtaggcggatctttcagagactccaaatcattgacaattcagaaggatcttgtcgctgcatttgacaacggagaccagaaggtgttcttcgatctgtgggaggagcacatttcaagttccatccgagatggggactcctttgcccagaagctggaattctatctccacatccattttgccatctatcttttgaagtactctgtggggagaccggacaaagaggagctggatgaaaagatttcctacttcaaaacctacctggagaccaaaggggcagccttgagccagaccacagagtttcttcctttctatgcccttccttttgttcccaaccctatggtgcacccctcatttaaagaactcttccaggattcctggactccagagttaaagttgaagttggaaaagtttctagctttaatatctaaagccagcaacacgccaaagcttttaacaatatataaggagaatggacaaagtaacaaagaaatcttgcagcagctccaccagcagctggttgaagctgaacgtaggtcagtgacatacctcaaacggtacaataagatccaggccgactaccacaatctcattggagtcacagcagagctggtggattctctagaggccacagtcagcggcaagatgatcacccctgagtacctccagagcgtctgtgtccgcctgttcagtaaccagatgcggcagagcctggcgcatagtgtggacttcacgaggcctgggacggcatccaccatgttacgagcctccttggcacccgtgaaattgaaggatgtcccattactgccctccttggattatgagaaactgaagaaggatttgattttggggagtgaccgcttgaaagccttcttgttgcaggctctgcgctggcgcttgaccacatcccatcctggagagcagagggagaccgttctgcaagcctacatcagcaatgacctcttggactgttatagccacaaccagaggagtgtgcttcagttgctgcactccacgagcgacgtggtgcggcagtacatggccaggctcatcaatgcttttgcgtcactggcagaaggtcgcctctaccttgcccagaacacaaaggtgctgcagatgctggagggaaggctgaaggaggaggacaaggatatcatcaccagggagaatgttcctggggccctgcagaagttcagtctcaggcgcccgctgcagacagcgatgattcaagacggcctcatcttctggctggttgatgttctgaaggaccctgactgcctgtctgactacacgctggagtactcggtggctttgctcatgaacctctgcctccgcagcacagggaagaacatgtgtgccaaggtggcaggcctcgtgctcaaagtcctttcggatcttcttggccatgaaaaccatgagatacagccgtatgtgaatggagctctgtacagcatcctttctgttccatccattcgtgaggaagcaagagcaatgggaatggaagacatcctacgctgcttcatcaaagaaggcaatgctgaaatgatccgccagatagaattcatcatcaagcagctaaattccgaagagctaccagatggtgttcttgaatctgatgatgatgaagatgaagatgatgaagaggaccatgacatcatggaagccgatctggacaaagacgaactgatccagccccagctcggagaactctcaggagagaagcttctgaccacggagtacctggggatcatgaccaacacggggaagacaaggcggaaggggctggctaatgtgcagtggagcggggatgagcccctgcaaaggcccgtcacccccggcggccacagaaacgggtacccagtgtaagtcagggctaaaggaagcgggaattgactttcttaagctttgttttgattacagtgtaagatgtatgtatttttaaaattcaaaatagagcattcattttgaaaggc

SEQ ID NO: 342 - DNA, 1772 bp, Homo sapiens
agcgctgcaaggacaaccggctggggtccttgcgcgccgcggctcagggaggagcaccgactgcgccgcgtaagtgccgcctgccctgcgtgggtcgtgccagctcagcgggacaggtcctcgcctcggtccctcggacttagggagcgcggggcagaccctgagagatggttggtgccatgtggaaggtgattgtttcgctggtcctgttgatgcctggcccctgtgatgggctgtttcgctccctatacagaagtgtttccatgccacctaagggagactcaggacagccattatttctcaccccttacattgaagctgggaagatccaaaaaggaagagaattgagtttggtcggccctttcccaggactgaacatgaagagttatgccggcttcctcaccgtgaataagacttacaacagcaacctcttcttctggttcttcccagctcagatacagccagaagatgccccagtagttctctggctacagggtgggccgggaggttcatccatgtttggactctttgtggaacatgggccttatgttgtcacaagtaacatgaccttgcgtgacagagacttcccctggaccacaacgctctccatgctttacattgacaatccagtgggcacaggcttcagttttactgatgatacccacggatatgcagtcaatgaggacgatgtagcacgggatttatacagtgcactaattcagtttttccagatatttcctgaatataaaaataatgacttttatgtcactggggagtcttatgcagggaaatatgtgccagccattgcacacctcatccattccctcaaccctgtgagagaggtgaagatcaacctgaacggaattgctattggagatggatattctgatcccgaatcaattatagggggctatgcagaattcctgtaccaaattggcttgttggatgagaagcaaaaaaagtacttccagaagcagtgccatgaatgcatagaacacatcaggaagcagaactggtttgaggcctttgaaatactggataaactactagatggcgacttaacaagtgatccttcttacttccagaatgttacaggatgtagtaattactataactttttgcggtgcacggaacctgaggatcagctttactatgtgaaatttttgtcactcccagaggtgagacaagccatccacgtggggaatcagacttttaatgatggaactatagttgaaaagtacttgcgagaagatacagtacagtcagttaagccatggttaactgaaatcatgaataattataaggttctgatctacaatggccaactggacatcatcgtggcagctgccctgacagagcgctccttgatgggcatggactggaaaggatcccaggaatacaagaaggcagaaaaaaaagtttggaagatctttaaatctgacagtgaagtggctggttacatccggcaagtgggtgacttccatcaggtaattattcgaggtggaggacatattttaccctatgaccagcctctgagagcttttgacatgattaatcgattcatttatggaaaaggatgggatccttatgttggataaactaccttcccaaaagagaacatcagaggttttcattgctgaaaagaaaatcgtaaaaacagaaaatgtcataggaataaaaaaattatcttttcatatctgcaagatttttttcatcaataaaaattatccttgaaaaaaaaaaaaaaaaaaaaaaaaaaaaaaaaaaaaaaa

SEQ ID NO: 343 - DNA, 879 bp, Homo sapiens
gatcagtgtgattgtcagtttaatttgcaaattgttcttatcacactaataacctgagttactaaagatgaaaagtgcacaaagactttatggagagctgctatttcttttttttttttttttcctttgtaatcgacagggcatgctactgggcatagagcatatatttaataaacatttgctgcttactcattgcatttcccttgaattctggattctagccactctaacactttactttttctttggttttagaaagcagatgagcgtcccactttcaaaattcttctgagcaatattctagatgtcatggatgaagaatcctgagctcgccaataagcttcttggttctacttctcttctccacaagccccaatttcactttctcagaggaaatcccaagcttaggagccctggagcctttgtgctcccactcaatacaaaaaggcccctctctacatctggggatgcacctcttctttgattccctgggatagtggcttctgagcaaaggccaaaaaattattgtgcctgaaatttcccgagagaattaagacagactgaatttgcgatgaaaatattttttaggagggaggatgtaaatagccgcacaaaggggtccaacagctctttgagtaggcatttggtagagcttgggggtgtgtgtgtgggggtggaccgaatttggcaagaatgaaatggtgtcataaagatgggaggggagggtgttttgataaaataaaattactagaaagcttgaaagtctttggtatctctattaacatgcagcctccctgaagcgccctatctcagtattccagaaagctctgtctagcattagtttggcatatcctacactgagaactcgacaggatcccc

SEQ ID NO: 344 - DNA, 1605 bp, Homo sapiens
gaagaaaccaccggaaggaaccatctcactgtgtgtaaacatgacttccaagctggccgtggctctcttggcagccttcctgatttctgcagctctgtgtgaaggtgcagttttgccaaggagtgctaaagaacttagatgtcagtgcataaagacatactccaaacctttccaccccaaatttatcaaagaactgagagtgattgagagtggaccacactgcgccaacacagaaattattgtaaagctttctgatggaagagagctctgtctggaccccaaggaaaactgggtgcagagggttgtggagaagtttttgaagagggctgagaattcataaaaaaattcattctctgtggtatccaagaatcagtgaagatgccagtgaaacttcaagcaaatctacttcaacacttcatgtattgtgtgggtctgttgtagggttgccagatgcaatacaagattcctggttaaatttgaatttcagtaaacaatgaatagtttttcattgtaccatgaaatatccagaacatacttatatgtaaagtattatttatttgaatctacaaaaaacaacaaataatttttaaatataaggattttcctagatattgcacgggagaatatacaaatagcaaaattgaggccaagggccaagagaatatccgaactttaatttcaggaattgaatgggtttgctagaatgtgatatttgaagcatcacataaaaatgatgggacaataaattttgccataaagtcaaatttagctggaaatcctggatttttttctgttaaatctggcaaccctagtctgctagccaggatccacaagtccttgttccactgtgccttggtttctcctttatttctaagtggaaaaagtattagccaccatcttacctcacagtgatgttgtgaggacatgtggaagcactttaagttttttcatcataacataaattattttcaagtgtaacttattaacctatttattatttatgtatttatttaagcatcaaatatttgtgcaagaatttggaaaaatagaagatgaatcattgattgaatagttataaagatgttatagtaaatttattttattttagatattaaatgatgttttattagataaatttcaatcagggtttttagattaaacaaacaaacaattgggtacccagttaaattttcatttcagataaacaacaaataattttttagtataagtacattattgtttatctgaaattttaattgaactaacaatcctagtttgatactcccagtcttgtcattgccagctgtgttggtagtgctgtgttgaattacggaataatgagttagaactattaaaacagccaaaactccacagtcaatattagtaatttcttgctggttgaaacttgtttattatgtacaaatagattcttataatattatttaaatgactgcatttttaaatacaaggctttatatttttaactttaagatgtttttatgtgctctccaaattttttttactgtttctgattgtatggaaatataaaagtaaatatgaaacatttaaaatataatttgttgtcaaagtaaaaaaaaaaaaaaa

SEQ ID NO: 345 - DNA, 3029 bp, Homo sapiens
cggggagagaagctggactgcagctggtttcaggaacttctcttgacgagaagagagaccaaggaggccaagcaggggctgggccagaggtgccaacatggggaaactgaggctcggctcggaaaggtgaagtaacttgtccaagatcacaaagctggtgaacatcaagttggtgctatggcaaggctgggaaactgcagcctgacttgggctgccctgatcatcctgctgctccccggaagtctggaggagtgcgggcacatcagtgtctcagcccccatcgtccacctgggggatcccatcacagcctcctgcatcatcaagcagaactgcagccatctggacccggagccacagattctgtggagactgggagcagagcttcagcccgggggcaggcagcagcgtctgtctgatgggacccaggaatctatcatcaccctgccccacctcaaccacactcaggcctttctctcctgctgcctgaactggggcaacagcctgcagatcctggaccaggttgagctgcgcgcaggctaccctccagccataccccacaacctctcctgcctcatgaacctcacaaccagcagcctcatctgccagtgggagccaggacctgagacccacctacccaccagcttcactctgaagagtttcaagagccggggcaactgtcagacccaaggggactccatcctggactgcgtgcccaaggacgggcagagccactgctgcatcccacgcaaacacctgctgttgtaccagaatatgggcatctgggtgcaggcagagaatgcgctggggaccagcatgtccccacaactgtgtcttgatcccatggatgttgtgaaactggagccccccatgctgcggaccatggaccccagccctgaagcggcccctccccaggcaggctgcctacagctgtgctgggagccatggcagccaggcctgcacataaatcagaagtgtgagctgcgccacaagccgcagcgtggagaagccagctgggcactggtgggccccctccccttggaggcccttcagtatgagctctgcgggctcctcccagccacggcctacaccctgcagatacgctgcatccgctggcccctgcctggccactggagcgactggagccccagcctggagctgagaactaccgaacgggcccccactgtcagactggacacatggtggcggcagaggcagctggaccccaggacagtgcagctgttctggaagccagtgcccctggaggaagacagcggacggatccaaggttatgtggtttcttggagaccctcaggccaggctggggccatcctgcccctctgcaacaccacagagctcagctgcaccttccacctgccttcagaagcccaggaggtggcccttgtggcctataactcagccgggacctctcgtcccactccggtggtcttctcagaaagcagaggcccagctctgaccagactccatgccatggcccgagaccctcacagcctctgggtaggctgggagccccccaatccatggcctcagggctatgtgattgagtggggcctgggcccccccagcgcgagcaatagcaacaagacctggaggatggaacagaatgggagagccacggggtttctgctgaaggagaacatcaggccctttcagctctatgagatcatcgtgactcccttgtaccaggacaccatgggaccctcccagcatgtctatgcctactctcaagaaatggctccctcccatgccccagagctgcatctaaagcacattggcaagacctgggcacagctggagtgggtgcctgagccccctgagctggggaagagcccccttacccactacaccatcttctggaccaacgctcagaaccagtccttctccgccatcctgaatgcctcctcccgtggctttgtcctccatggcctggagcccgccagtctgtatcacatccacctcatggctgccagccaggctggggccaccaacagtacagtcctcaccctgatgaccttgaccccagaggggtcggagctacacatcatcctgggcctgttcggcctcctgctgttgctcacctgcctctgtggaactgcctggctctgttgcagccccaacaggaagaatcccctctggccaagtgtcccagacccagctcacagcagcctgggctcctgggtgcccacaatcatggaggaggatgccttccagctgcccggccttggcacgccacccatcaccaagctcacagtgctggaggaggatgaaaagaagccggtgccctgggagtcccataacagctcagagacctgtggcctccccactctggtccagacctatgtgctccagggggacccaagagcagtttccacccagccccaatcccagtctggcaccagcgatcaggtcctttatgggcagctgctgggcagccccacaagcccagggccagggcactatctccgctgtgactccactcagcccctcttggcgggcctcacccccagccccaagtcctatgagaacctctggttccaggccagccccttggggaccctggtaaccccagccccaagccaggaggacgactgtgtctttgggccactgctcaacttccccctcctgcaggggatccgggtccatgggatggaggcgctggggagcttctagggcttcctggggttcccttcttgggcctgcctcttaaaggcctgagctagctggagaagaggggagggtccataagcccatgactaaaaactaccccagcccaggctctcaccatctccagtcaccagcatctccctctcctcccaatctccataggctgggcctcccaggcgatctgcatactttaaggaccagatcatgctccatccagccccacccaatggccttttgtgcttgtttcctataacttcagtattgtaaactagtttttggtttgcagtttttgttgttgtttatagacactcttgggtgtaaaaaaaaaaaaaaaaaaaaaaaaaaaa

SEQ ID NO: 346 - DNA, 699 bp, Homo sapiens
gcttaggcgcagacggggaagcggagccaacatgccagtggcccggagctgggtttgtcgcaaaacttatgtgaccccgcggagacccttcgagaaatctcgtctcgaccaagagctgaagctgatcggcgagtatgggctccggaacaaacgtgaggtctggagggtcaaatttaccctggccaagatccgcaaggccgcccgggaactgctgacgcttgatgagaaggacccacggcgtctgttcgaaggcaacgccctgctgcggcggctggtccgcattggggtgctggatgagggcaagatgaagctggattacatcctgggcctgaagatagaggatttcttagagagacgcctgcagacccaggtcttcaagctgggcttggccaagtccatccaccacgctcgcgtgctgatccgccagcgccatatcagggtccgcaagcaggtggtgaacatcccgtccttcattgtccgcctggattcccagaagcacatcgacttctctctgcgctctccctacgggggtggccgcccgggccgcgtgaagaggaagaatgccaagaagggccagggtggggctggggctggagacgacgaggaggaggattaagtccacctgtccctcctgggctgctggattgtctcgttttcctgccaaataaacaggatcagcgctttaaaaaaaaaaaaaaa

SEQ ID NO: 347 - DNA, 803 bp, Homo sapiens
gagcggttccgctgccctgaggctctcttccaaccttccttcctgggcatggagtcctgtggcatccacgaaactaccttcaactccatcatgaagtgtgacgtggacatccgtaaagacctgtacgccaacacagtgctgtctggtggcaccaccatgtaccctggcattgctgacaggatgcagaaggagattactgccctggcgcccagcacgatgaagatcaagatcattgctcctcctgagcgcaagtactctgtgtggatcggcggctccatcctggcctcgctgtccaccttccagcagatgtggatcagcaagcaggagtatgacgagtctggcccttccatcgtccaccgcaaatgcttctaggcggactgtgacttagttgcgttacaccctttcttgacaaaacctaacttgcgcagaaaacaagatgagattggcatggctttatttgttttttttgttttgttttggttttttttttggcttgactcaggatttaaaaactggaacggtgaaggtgacagcagtcggttggagcgagcatcccccaaagttctacaatgtggccgaggactttgattgtacattgttcttttttttaatagtcattccaaatatgagatgcattgttacaggaagtcccttgccctcctaaaagccaccccacttctctctaaggagaatggcccagtcctctcccgagtccacacaggggaggtgatagcattgctttcgtgtaaattatgtaatgcaaaatttttttaatcttcgccttaatacttttttattttgtt

SEQ ID NO: 348 - DNA, 31737 bp, Homo sapiens
gaattctctccctcccatctgtggctgagattaaagatctgcacctgaagcactgaagaatgtgtgggtaattaaattaccctgccgattcctggagatgctgattacctggagatgacctcagagattatcctaaattaactcctacaagacacacattgcagcgggaggtgaggtaggggaaggattgtgcacctgaggctagcaaaggtttccactctgtttagagatgatgtcaccagtgcgtttacatttgcgttgtgttcacacattgagtgctactatgtacaagaccatgtgtcagacactgaggtaacaggtatagctactagatagagttcatagctatggaggcaagcagattcactgactgctaattctaacatgatgtgacagtgcaactagaaaaacataaacaagcactatgtgagcacaaagaaggtgcacatcaactccttacaggtacctgtaaaagccaaagggtaacagttggattgcaccttgaagaggatgcacttttttttttttttaagacagaatctcactctgttgcccaggctggagtgcagtggggcaatctgggctcacttcaacctctacctcccgagttcaagcaattctcctgcctcagcctcctgagtagctggtactagaggcatgcgccatgatgctgggctaatttttgtattttcggtagacgtgaagtttcaccaagttggccaggctggtcttgaactcctgacctcaaatcatccacccacctcagcctcccaaaatgctgagactacaggcgtgagccaccgcgcctgacctggatgtaagattttgataggtacagaacaaggaaaagactttccaggccgggcacagtggcttatgcctgtaatcccagcactttgggaggccgaggtgggcagatcacgaggtcagcagttcaagaccagcgtggccaacatggtgaaatcccatctctactaaaaatacaaaaattagccaggcatggtggtgggtccctgtaatcccagctactccggaggctgaggcaggagaattgcttgaacctgggaggtggaggttgcagtgagcaaagaccgcgccactgcactccagcctgggtgacagagggagactccgtctcaaaaaaaaaaaaaaaagactttccagaaggagcagcataaacacaggcatgacatgtttccataatggcaagtggccctaaatgactagaatataaggtagatccagtaggaaaggacttagaaggggctttggaaggtgagtctggaaattaaaactggggtaaacgtgatggaccctgaacatcattatactgcttaagatgctaatcttaatcctgaaggtaatgggaaaacctcctaaggtttatgttattttctttctacttaggctatttaaaaagtggagtgacggccaggcgcagtgactcatgcctgtaatcccagcactttgggaggccgaggtgggcggatcaccaggagttcgagaccagcctgaccaacatggtgaaaccccgcctctactgaaaatacaaaaattagccaggtgtggtggtgggcgcctgtaatcccagctacttgggaggctgaggcagaagaattgcttgaacccgggaagtggaggttgcagtgagcagagatcgtgccattgtactccagcctgggcaacaagagcgaaactcagtcacaaaaaaaaaaaaaaaaaaaaaggagtgacatgcttagatctctgttttggaatgacaggttttttgtttctagcatcaatccaaggttcatggcttgagaaggtgtactgccagcaatgccattaaccagcaaagggaatgcaggaagaggaacagatctggtgggcatcagtttggatgctctgagtttgagctgcctgtgaaaactgcaggtggtgatatgcaattaacattcacatacggagttcaaaactagagacacaaatttgagagtcatcacagaaatgtgaagtgtgttttctataactaaagataaccatgctaacatagccatgtgttacattagcattttttttttttttgagacggagtctcactctgttgcccaggctgaagtgcagtgcacaatcttggctcactgcaacctccacctcctgggttcaagcgattctcctgccttagtctcctgagtagctggaattacaggcacctaccaacacgcttggctaatttttgcattttagtagagatggggctttaccatgttggccagctggtctcaaactcctgacctcaagtgattcacccaccttggccccccaaagtgctgggattacaggtgtgagccactgtgcccggccttacattttgtgttttttcctgctgcttgtatgtgtgcaagtctgtgtatcatcaatgggtatatgtgtacctgcgctgacaacaaaaaatgagatgcatatcagctactacacaaagctgttataaggatgaaatgcagttagccagtgctcagtaaagggcagttgctttactactactaggtggggtggtgtatgtgagaatctgtatactgccattagtaggctttagtatgtagtgtgcatatggaattcatgcattagtgtgtagtatgtgtgggacccactcacctgagcagcttctctccccacttacagtggcatctgttgaggattcctgtgagggataaggcagggagtgaacttgttacaaggcagggacagggaatggaatgtgtttatgtgtctaagctgaggcatccaggtcagaggtgctggttgttgaggaagctggcctgggagggcacaaaggcagccaaagctggtgcctggccacaaatatgagctgggattaccgtacatggagatgggggaagggatggacactcacagggacacttagccagaaaaatacacaaagcagacctagttaaaactcaagaactggccaggcacggtggctcacgcctgtaatcccagcactctgggaggccgaggcagacggatcacgtggtcaggagatcgagaccatcctggctaacatggtgaaacgcagtctctactaaaaatacaaaaaattagccgggcatggtggcaggcacctgtagtcccagctactcgggaggctgaagcagaatggcatgaacccgggaggcagagcttgcagtgagcggagatcgcgccactgcactccagcctgggtgacagagcaagactccgtctcaaaacaaaacgaaacaaataaacaaacaaacaaaacacaaaaaactcaagagccctcccgcccctccaaaaatacaaaaactcaatagctggccgggcagggtggctcatgcctataatcccagcactttgggaggccaaggcaggaggatcacttgagctcaggagtttgagaccagcctgggcaacatggcgaaacaccatctctactaaaaatacaaaaaaattagctgggcatggtggtgcaggcctgtagttccagctattcaggaggctgaggtaggatgaggcagaagaatcacttgaacccaagaggcggaggttgcagtgagcctaaattgtaccactgcactccagcctgggtgacacagcaagattccatctaaaaaacaaacaaacaaacaaaaaactcaagagcccaacacacatatgtaaaaaactggacggccgggcgcggtcgctcatgcctgtaatcccagcaccttgggaggctgaggcgagtggatcccctgaggtcaggagttcaagaccagcctgggcaacatggtgaaaccccgtctctactaaaaatacaaaaattagctgggcgtggtggcaggtgcctgtaatcccagttactcaggaggctgaggcaggagaatcgcttgaacccaggaggcagaggttgcattgagccgagatcgcaccattgcactccagcctgggggacaagagcgagacttcgtcacacacacacacacacacacacacacacacacacacacacacaaaactggacacaactggccaggcgcggtggctcacgcctgtaatcccagcactttgggaggccgaggtggacggatcacgaggtcaggagatcgagatcatcctggctaacacagtgaaacccgttctctactaaaaatacaaaaattagccaggcatcgtggtgggcacctgtagtcctagctactcaggaggctgaggcagcagaatggtgtgaacccaggaggcagagcttgcagtgagctgatattgcaccactgcactccagcctgggcgacagagcgagactctgcctcaaaaaaaaaaaaaaaaaacctggacacaacttactgagatatgaaactatatggatatttgcggagatgtccctaatataccctaaagccagagacaactgataaagactctatacaaatcaaataggcagttatgcagttacaaaactcttctctatacacaaggtctcccaaagtccctaacaggtacccaactagtagaaacattcatacaaacccagggaaggaacacagaattggtaaagtaatggctgatatgcaacaacactgtacagccacaaagtatgggaagatgctcaagcttggggggcggggggtacaaataggtaagaaatttggattggcatgaaagagatatctgacaatgggagtgaagtgggaagggaggctgggacacatctttggagccaattgcttttctggtaggtctttgtaatgtgagatgagggatggggcacacctaccaaagaggctgagcccctccttcagtccactggccactttgtacactgaggggtgagactcactcttaaaaatctgtagaacactgtcgaggagaaatggaggagtttggggtaacttggacttttgaagggaataagaattgaggactgataaatggaatggggacaggggatatcctcctgagatcacgtcttttttttttttttttttttgagatggagtctcgctctgtcgcccaggctggagtgcagtggtgcaatttcagctcactgcaacctctgcctcctggattcaagcaatcctgcctcagcctcctgagtggctgggattacaggcgcacaacacacccagctaatttttatatttttagtagagacggggttttaccatattggtcaggtctcaaactcctgacctcaggcgatccacccgccttggcctcccaaagcgcggggattacaggcatgagccaccgcgcccagccgagatcatatcttgatgtaaggtttgtcccttacttttctttgcctcagtttctccctatagaaaagaaagctagtatctttatgcttttcttcctctctttccctcaaaaccccccttccctttccttcaaggagagagatcttaatagccccaggattagggaaactagagcctcattaggattattggggcattaaacttaatccttctccctccccagagacagcagcatgcctccacctctttacctgtaagtgtcttgatctatgttcaccagatgagtcctgaggacagaaaacaaaaaagcaggaagcagtctgagttcgttccacaactccacttcctttgtccccctctctgaatattgtcccagtcttcttcccaaagtctcattagcccttagattctcccgggtgtcctagagcacttgacccactgggtcacagccacatccacaccccacccccactttacttttcaggcctcccaatcccacattactttggttggggttggggtgaatcacctacaacataaatttcttaaagcccaggatggggacgctgacattatagtcttccagttcaaccccgattcttcttcgacccaggaacttcagcagccctccaagtgctcgaacctgggaggggatcagcagtggaatcggggtaaatcttaaatctcctgggggctgcagagcaccagggaaagttactattttccagggctaggccagtacctcccagaattcagccctagcacttgtgccgcctcccagcccttatcccccaggaccaatctcactgtgaggaggcagtcaaagggaataatggaagagaggaagaggattttctcagtggcagtcatggcgtctgggatgaaggagtagtttccagaaaggaggcgttgtttgcttatctccagacctatttgagggaggcaagcaaagggaacggtcttgtagctcaattttttcaccccattttaagaatgagacaatagaagcaagagagattatttgacttgcccaagctcacacaggcagttaatggaaagctagagcaagaaccaaattttcagactcttagtctaattctctttttattctacatataatataaagatacttgtctgaaagcacagcctgagaaagataaatggctgaggaaagtagacatctgtctggaattgaggattttggtcaaaataatggtattaatagaactagtaacactaatgccttaatatctaattaggatagtacactcctgttcttattgtaaacctaggaaagttatagaagtgccttatggatcataataagggtcactgaggcagtgccttttggtttggtgataaaaggctttaacttaatggggagaattccaacaataaaaccctgtccaaaaagtgtcaccactcctcaggggaggccctcatccctagacatgacttaagcagaggcttcccaataagctgcaggttattaaagggtagggagcaggagagatcttggggggacaggtcatagggcatgaggagcacaaaggtttaggatgacataaggcagaggggagatctgtgatgatgaaggtagagttgggggaaagaatgggacaccggaacagggagttaggctaagcaaaaggaaggagataccaaaatccacacttggcaaaaatatgatttcaggtcttttaggctctctgtgctcctgggaggctgtgggggaggaaagaaaaggctatcattctttacatctcagtccttctacctctgtctgacactccctctcacccaattctagccccctggaatattccatatattagtccttccccattttccctctatcctttaccaagtccttaccaagctttcccagaaatcgagtcatattctcatcctgtttggcactcgtaacaacagactggggattgatctcatccagaacttggaaggagaacagagatcaaatgagttaaaggatctttgtctttgactaagagaaaacccatagccctcctcttcctacccctctccttctcaaaaacatttcctccctaggagtagggagtgctctgcacagtgggaacacaggtagaagttgagatttagaaaagtagttaagagtggtgggatggtgagagggaagtgggatgttctggatgttgtcactaggctgtaaacccctggagaacagacatgactgatttgcccagggctgaatctgaagcacctgaaacattgtaaatacgtcatatatatttgtggccaggcacagtggctcatgcctataatccctgccctttgggaggccaaggcaggcagatcactggaggccaggagctcaagacaagcctagccaacgtggtgaaaccctgcctctactaaaaatataaaaattagccaggcgtgatggcagattcttgtaatcccagctactcgggagactgaggcaggagaattgcttgaatccgggagacggaggttgcagtgagccaagatggcaccactacacttccagcctgagtgacggagcaagacactgtctcaaaaaagaacaaccaaacaaaccaaaaaacaacctcacaaatatttgttaaataatgaaatgaattcataaaaacaaaagagggagcctctgtgaagcaactgtaaaatatattgagtcagtgctatagtttggatgtgatttgtccctgccaaatatcgtgttgaaatttaatccccagtgtgatagtgttgtgaggtagggcctagcaggaggtgtgtgggtgatgggagtggatcgctcatgaacagattaatgcccttcctggagtgtgttggtgggtatgagtgagaggttctcactctattagttcctgagagagctggttgtcaaaaagagcctggcatctccctcccccttgcttcttctctgccatgtgacctctacacaccctgccttcccttcttccatgagttgaagcagtctgaggctctcaccagtgaagatgcccaattttgagctttccaaccatccagaaccataagccaaataaaacttttttttttttttaacaaattactcagagtcaggtatttccttacagcaacacaaaatatgctagacagtgaggtgagttaatgtaagtaaaacatggctgggcgtggtgactcacacctgtagtcccagcactttaggaggccaaggtgggcggatcacaaggtcaggagtttgagaccaccctggccaacatggtgaaacaccatctgtgctaaaaacacacacaaaaaactagctgggtgtggtggcacacgcctgtagtcccagctactcgggaggttgagtcaggagaattgcttgaacccaggaggtggaggctgcagtgagccaagattgcgccactgcacttgagcctgggtaacagagcaagactctgtctagaaaaaaaaaatatgtgtgtgtgtgtgtgtgtgtgtgtgtgtgtgtgtgtgtgtgtaacacatctgcaatcccagagagcagaggaattcatggttccatccccacctctctggagaagcttgaggctctcgtggtctggggcatctggcatgaagtggatagtggagtcactagtatcatagtaggcaatgcccaagtatcctgaattccacagcacacacagatggatctgtccagcaaggaagaaaggaaatcactattagaatcactcataagtgtagggtttaccatgtcttatataatttaatcattttctcaaatctctgagataggcatcatcacccccatttagtgaatgtgaaacagccactcaggaggtaagagacttgcccagctcttcccaaccctgttttttttttctttctttctttgagacggagtcttgctctgtcgcccaggctgaagtgcagtggagcaatctcagctcattgcaacctccgcctcccgagttacagtgattctcctgcctcagccttcccagtagctgggataacaggcacgtgccaccacgctcggctaatttttatatttttagtagagacggggtttcgccatgttgcccaggctggtctccaactcctgagctcaggtgatccgcccgcctcagtctcccaaagtgctaagattacaggtgtgagccaccgcgcccggctcccaaccctcttttattctaacttcccatcaactctccattcaagtttctactcccctcagagacctcggccagctcctcctcctcctcgacttcctcctcctcggcctccctggggcccggcactggggccgggctggggaagccggaggaggccgccccaggtctcggtccctgcggtgtcctccttgggttcgctcctaaggaggccatgagcttggaggctctgcggatgcaaaaagtgagggcggttcggaagcaacgattcacagaggaggccggggtagggtggcgcgcagaatgcaaagcactaagtacttctgctacagggctgcggggcagggctgaggggcgtggagagctgtggacacaggaggtgaattctcgggtatttaactaaagtacagattgtgggaaactccacgcgccccaccctcattcctgtcacgcggaggttaccctttggaaggaaggggtctgagggccctgtggggcgagtcgtgcacgtcttatgtctctgcctctgccaaccacgcgccaggaccccagcctcacgcgcttatcttcctcctcccccagctgccgccatcgcagcgttttcccgccttttcagtaacctgagtcgctacaggtgggagaacgccccgctgaccgaccgccacgagcctgcaaaaggagcgcgccggcgcgtgagcgaggtgcgcgcgcacgcgccccgccctcctagccgctgttgattggagaggcccggatccagcctagagatccgacagggcgaggaggagaagcggactgccgtagctgaagagtctggacgctgattggcctatttgccttcggggcgggtccagaacgttcaaacttcccgccctctgccgttgcttagcagccgggcctctagcactcactgtttctgggatttgattggcgcagtgggaagcccgcgagaaggtcggaccagggtccgtagtcccagtccctggaaggggtttgggaccgttgcgggggttttgagggggaggccaaacttaaagagccagaggcgcttattttttttcctgcaacaactcttaagttaatatttgtaccctctgagttaatatttatacagagcttagaacagtgcctggcaaacaaagtaagacctaaatgagcggtgtttcaaataaataagcggaaacaagcaggacttctgtctcagccctaccgtgcctgtttcctgggtacagggtatgaccacccccataatggcacgacagggcctaatttattatttaaacccttcaagcagaggtggaagcattcgaattacatcaaattctggcagagagaagtagttctgatcagaacactcacacccctactgggacatgcccataccccttcgcacttctacacacccctgaagacagagaggtatctatcattcatgcattcggcaactatttagtgcctattttgggccaggggttggactcaaagcggtgaacataatgaagtcactgctccataaagcttatttgtgcgtctgtgtgtgtgtgtgtgtgtgtgtgtgtgtgtgtgtgtgtgtgtgttgcgggggtggggttatgagggagaaagaaaaaaaatatatatatatatatatataatccctttaaatgcaccatcctccccagctttgttcctagtaccctgagatggggagattcctccccagccccccaacccaagaagttaggaaagatggtgggggtgagatgacctagctgtgctaaccagtaattggaaaatcccctccagcaagaaaggtgggggaacagagttaagggctgggttaatggttacccctggcaaatctgttgagcaatggagctatagaaacttggaggaggttggtgacagctctggggagtgtcagggagggacccaccttccaatctggggtgtgaagagattagggactagtttaccaagcccaggaaggggagggagtggaaagagaagcccagagagggaaagaggagctactgagataggagaaatgcagggacagggaggtgagatggagggaaacctctgttgcaggatttgggggtacagccctggctctgctggatggttccaggagagggcagcgttgcctgtcacctggtaaattaaggcacgataccctgtgggtagtcatgccagccagccaaagtcaatattgatatcaaggcagctgtagctataaagctgtaggagagaaaagagaggccgggagaggctgccaaacctgtttgatcttcaagctggccccatttacctaaggcttctcttggacacagaccagttggaacaggagaggaccctgagaagtagagttgttttgatcccctcccctcaatgggaaggggtcctgtgtgcagattttgagggtcaccatgagggaattcacacccacacagaggcatggaatcatacccttacaggatgttacagttcaagggaacgaacaccaaagatagcctttctgtcgggaggagagaaaaaggccctcccacaagcaggagaaaacccacagaagaggaagcacaagaggaaaccaccaactgctggtttccagcagcacatcacgtcactccaccccactcctcccccaagtctctccctttctttaagtttcaagctctgttttagttctgtgttcttgcactccaccatggttttctggaactgtaggtcttttgttggacagagggtgatgaggaggatagagaagggatggttggacaggagagaaattcaggatatggaggctggaattctgggtttattttttcagcaggtcataaaggtttaatagaaatcaaggttactggagagagagctgctcctcctatgtcctccctgcttatttatttaggtgtccccaaggactctactcccactattctgtctgatctttctttatccccatgacaggaccagctaacaacacccctaccccaccccctatacacatacttcaggatcgggccatgataatcccacccctctgccccatctccaaggcaacctgtcagtgagacgaggacaaagggcacaggaaggggccccaataggaaacataagtggaagcacaaagctgaccaagctacaggaacagacccctccctgcaacaaagccccttgcctcggctttatgtttccttcgcaaaagacttcgtcatctcccttcccatccctaactctactttctttttcttttcttcttcttctttttttttttttttttgagatggagtttcgctcttattgcccaggctggagtgcaatggcaccatctcagctcactgcaaccttcacctcccgggttcaattgattctcctgcctcagcctcccaagtagctgggattacaggtgcccaccaccccgcctggcaaatttttgtatttttagtagagacagggtttcaccatgttggccagtctggtcttgactccctgacctcaggtgatccaccccccttggcctcctaaagtgttgggattacaggcgtgaaccacctcacccggcccctaactctatttcctatgcccaatcccaagtgtaggccacaaggactgcaagtcctagtgctgagctgggcccggagacagtagactgcggggggcacaggacctactgagacaccagtctgggcagctcagggagtgctggcgtcaccccttccctaatcccaggctgcatggctaacggttcctatctgcagtcccagccttccacttccgagttcttctctcagaccacagtcccagcaacccagaatttggattggagtctggaagaaatgcagaatgattaaacgaccacctttccatttgaagtccccatccctgaatcttcacgggtgtgcccaagctgttagtgtcaagttttttatatgagggtcagtcgggttgtactcagattaatgaagcagggaaactgaggcagaaaagagtcctgtgttcaggagaggtcggagaaacaaggaggttttcaggactcctccttaacacccccatccccatcctgtgggagatccgaggattccccttccggactcactccctacatcgtcgagtcccgcccccctccagtcccctccccaggttcagggcggggccggtcggtgagtcagcggctctctgatccagcccgggagaggaccgagctggaggagctgggtgtggggtgcgttgggctggtggggaggcctagtttgggtgcaagtaggtctgattgagcttgtgttgtgctgaagggacagccctgggtctaggggagagagtccctgagtgtgagacccgccttccccggtcccagcccctcccagttcccccagggacggccacttcctggtccccgacgcaaccatggctgaagaacaaccgcaggtcgaattgttcgtgaaggtaagaacacttctctcctcagccacccaaattcctggaagccaactctcacctttcccccggtccagccttaactccccaatcccttccctccttgactcccacccccaatcccacgtgcactctttggttgaggggtggttttgagaggggaagacattaacttgttagcaagtaatgagaattctaggatcaaccctgaaaagtttgtaaaagtgcaagtttctagcagactaaaggaagggaagtggagaaaaaggagaattcccaaaagtgagactggggtggggttagagggcgagctggtgaagggacagtgggggcccagcagggtttagaagggacagaggggaacctcagttaggacatgtgtccctacaagatctgagggtgagtagtgcagtaggagaggtgtgtgtgtgtgtgtgtgtgtgtgtgtgtgtgtgtgtgtgtggatggagacgcttcagggaagacggtgtgttgagggaggcctgagagtgagagcaagtaaattgggaagctttggaggggcggaacaaaacaggagactgggatcggagtttgaaaagcagagctggagaggtgatcgggtggcattgaatatccccaggactggggaaagggacagaaggggaggtggcaagaagacgtgagtttaacgtagctaccacaaggatgggtgggagagagatcagacggaggagaagagctcggttagggcattttgggatttgggggttggagaagtagaagacttgccccaactctctcctctctctgcgggtgtgggtaaggagagatggtcctatggcatttgggtagcaaaactgcaggcagcaggcttctcggtgtcacccagcccccctctgattgcagcggccgctcccctccctaccgctgctgcattcatttcccagtcttgggacctcctggctgtgcccctccctcccttccttaacagtgtcctcttctccccgctccgtttgtgtctctccgttggcacgcacgtctccccactctccactttcctgccgcctttctttccccttccccccttttgtttctctcatctttgtgtgtctctgcctgtgtctccctctcccttctgcttgggtttctcgggcagccattccctctccctgggcccagggaagtcggagcctgcttgggtccgcccccttaggtgtggtccccacctcactctcacattcgcctccggggctatttttactcgtgggtgaggctgtgccgcagagattccggccctgtgtcctgtgagaggatggttattgcagtcagaggacttgtgctgggagaccctggcaacaggttaggggtagccttagctgcccaggcctcatcctcactgtcccttcccccacatccttgacaggaaggaagccggagacagagagatgaatcaccctcagcttagggggaggtgtcccttgggccaatgaggtcaccacttgctaattagagggcagcccctctctgtagggccctccacatctctagcgcgaggcccagggccccttgactagactccccacccaaagacaccttggattggaggtgtagagaaccaaaactctggctcccaaaccccacccacctctcctgtcttcagactctactcccttcaggaacccagaaatccaggcttctagcctacaactctggcctcactgaagttccacacccttccctctctaggattcagatcctcccaagttctccaggacctcctccctctacctacctcccacctgtcctcagtgtctggggaaccagaagcctgcctttgcaaaacagtttcccattgatctgccttaggtttgacccaggcccaagggcaaagagcccatagtgaggggacagtgtatgtgtcatgactaggcagaaaacagctggtctgggagtgggaatgcagggactggcctagggatgggtggggtgcatcaggcataaccttgggttggggttacttttcaggctggcagtgatggggccaagattgggaactgcccattctcccagagactgttcatggtactgtggctcaagggagtcaccttcaatgttaccaccgttgacaccaaaaggtaggcctgcttatgttccttgaaacacccctggtgtacacatgtgtgcaaacacacacccacccgagtccttctgtcatgaacatttttgccctccccctggagtccctttcttatcccacgtcctccattccccctttctggttcttcctgacccccatttccagtcctgattcctgatcctttctccaggcggaccgagacagtgcagaagctgtgcccaggggggcagctcccattcctgctgtatggcactgaagtgcacacagacaccaacaagattgaggaatttctggaggcagtgctgtgccctcccaggtataggggcactcagaaagtggagaggtggagcagggagattctgggaaacagacagtttgcagaaatggaaaacagagatggtggtggggctggggcaggagagctagctgaggttcctcccaggaagacatcttacctcatttttcccattggctttcaggtaccccaagctggcagctctgaaccctgagtccaacacagctgggctggacatatttgccaaattttctgcctacatcaagaattcaaacccagcactcaatgacagtgagtcttgtgggtcagaggcctgggtcctgggaggaatagagaggacccagcgggtaggagacattaggggcacctggacgttcagatatcagggagatgaagcagatgttcgtaaatttcccccagcttcccatttttgctttacctctatatttccctgcattttcattggccaagacttttaagcttttctcatttgttccctagcctcttctgccccactgaggacgttagttggctgctggcctgttttctggcagaatagggtcatgcttaagaacagtcatcactctagatccagactacctgagtacaaatccaactagccgtataattttgagcaatcatttcacctctctgtaagtccatttccagatccacaaaattaggatgacaatacctatttcatgggttgatataaatttttttttttctttttttttgagatggagtctcgttctgtcgcccaggctggagtgcagtggtgcaatcagctcactgcaacctctgcctgccgggttcaagcaattctcctgcctcagcctcctgagtagctgggattacagacgtgcatcaccacgcccagctaatttttgtatttttagtagagacagggtttcaccatgttggccaggctggtcttgaactcccgacctcaggtgatccacctgcctcggcctccaaaagtgctgggattacaggagtgagccactgcacccggcgatataaatgagtttgtaaaatgtaaagtgttcactttgggaggccgaggctagcgcaccacctgaggttaggagttggagaccagcctggccaacatgactggtctctactgaaaaaaatacaaaaattagccagttgtggtggcaggcacctgtaatcccagctactcaggaggctgaggcaggagaatcatttgaatctaggaggcagaggttgcagtgagccgggatcatgccactgcactccagcctgggcaacggagcaagactccgtctaacataaaataaaatgtaaagtgcttagaataacacatagaaaagtaactacatgagtgttagctattattattttggactcaccattagtatccacccccaacgggccttttcggactatgtcaatcttttcctgaagttctaatcagttccctctcttgcacagatctggagaagggactcctgaaagccctgaaggttttagacaattacttaacatcccccctcccagaagaagtggatgaaaccagtgctgaagatgaaggtgtctctcagaggaagtttttggatggcaacgagctcaccctggctgactgcaacctgttgccaaagttacacatagtacaggtgtgtggttattgcgggaggagaggatgaccactggagtggccctttaaggagctcccacatgggcttcccctgacaaccactctaaagacgatttctttcttagggtggttttcataaattgctaccaatggcagaccccaccccagtcctttgcagcagtcattgctaacaagaccactgcttgagataattatattccatgatgtaagtcatgggtgcaaacagactagcaaagaggaatacatcccagtattacttttgaagaatgctcttcctgtctcggtatcactgccaaattcccagattagacagagcaggcttttcctaaagtcaaagctttaactttctttataacttcagtcttcacttcctcttgtggaagatcaaaactgctggttcccatgtttttgtcatagtctcaaagctatggtttagtttgtgcaacatgggcctgacatcagtctgccacacaactatgtagtgaacatctgtgtactaagcattgaaagatacacaagtgtatggtgactgggccttgctctcaaagggttgaaatctgagacaataaaatattcacatgaaagttaagaatatatgatgaaaagtcagatgggccgggcgtggtggctcacgcctataatcccaacactttgggcggccaaggctggtggaccacctgaggttaggagttcgagaccagcctggccaacatggtgaaaccccatctctactaaaattacaaaaattagccgcacatggtggtgggcacctgtaatcacagctatttgggaggctgaggcaggagaatcacttgaacccgggaggcggaggttgcagtgagccaagatcgcgccattgcactccagcctgggtgacagcaagactccatctcaaaaaaaaaaaagtctgatgaaaaatatagagacaaaagtcacctgtgtcagtgcctgaagtggtatagggggaaaaagtcactgtggaaattcaagaggagaattttataagtaaattatatctcaagttttaaaaactcaggaaaaatggctggttattaaaagccaggatttcagtaagtgagaaggaaggctaacgacagtacaagacagtgaggagttgagctggttttatcatgtcggcctggggagaagggaaagccaaggtggcttccctgggtctaacatgttggtccctctcctctccccatcctcaggtggtgtgtaagaagtaccggggattcaccatccccgaggccttccggggagtgcatcggtacttgagcaatgcctacgcccgggaagaattcgcttccacctgtccagatgatgaggagatcgagctcgcctatgagcaagtggcaaaggccctcaaataagcccctcctgggactccctcaaccccctccattttctccacaaaggccctggtggtttccacattgctacccaatggacacactccaaaatggccagtgggcagggaatcctggagcacttgttccgggatggtgtggtggaagaggggatgagggaaagaaatggggggcctgggtcagatttttattgtggggtgggatgagtaggacaacatatttcagtaataaaatacagaataaaaatcaagtgtttttacgcaatgggggtttaaagtgtgggcgacatggaatgaggggtgggtcagtgatcttgagctcagggcagaagccaggaattaagaagggaaatgtttgtggtggggctgctatgtttcgtgccggtccgccggtccgccgttgcgctgttctgaggtctacgaagcgtttgcagccccgtcgccagggccggccagatctgggtgggcctgggcagcgctcgctgggcggtgccgatttctggcaaggggggcgcagtctggatgtaatgggcgcggcttagcagggcggaatgggcgtggcccgaagaagccccgccccgtcccgcttagacaatgccccggagccgccagaccgtcgcgcccctgccccatcgtagtatatgagctcgcctacacaaggacccccgctaaaagccagagctcccagtccccgaggcttgaagacggggactcccttctccaccaactctgtcctcggggggtggggccccagccgagatcacagcgcgacaggagtgggggtggccgctggaggtgagtcttgcgtggggggccctgaaccgtgtgggggccggagtttgggggtgccgggcccatgcctgcaccagacagagagtatggggagccggtatttgggcgcggagctaggcggggtggactttgggacatagacggggaaccgggtcctggagccgggagtagtgccagcgccccggaaccacgccccctgttaccccgcccctcgcatttcgttttagacctctcccagtccttcgggactcggtctggtttatactaggtcgtgctaggggcagcgtgaccagccagggcggagagaggatgcttaactccttaggctcgaactcctcccttcctacccacctctctcccttctcgttcgggtattcaggacttccattccccagcccctgcctctccagctttctccttctgtcccataacccctgcgggtcccgggctggacttccagtccctgcggtagcgagcagctgagggttaagggggcggggctgctgcatttttggggagtgagcgcatcctagtggctgccaagaggggcgcccgacagggacctcacaagcccccaagcaggggcaacaggtgttttggagattagagaccctagccttgttcctcaggctcctcttaaagaatctgacccctgagggtgctgggtagagtgaggtcgacaggagcggaaggtctggagtgggtggggcggagtgggagggacgcctagagatggcaggaggaagacctgggcgctcttaaccacccccaacgcccttgtctgcatgtctttttctctgtctcctccttttctgtttcttctcccagacaggtgaagaaacaagaaaactaagaaatccgagcggttggagggggagtctgtgtggatgggatggggacgccgggggaggggctgggccgctgctcccatgccctgatccggggagtcccagagagcctggcgtcgggggaaggtgcgggggctggccttcccgctctggatctggccaaagctcaaagggagcacggggtgctgggaggtaaactgaggcaacgactggggctacagctgctagaactgccacctgaggagtcattgccgctgggaccgctgcttggcgacacggccgtgatccaaggggacacggccctaatcacgcggccctggagccccgctcgtaggccagaggtgagcgccgtggcgcgggtgtggtatggggaaaggcagaaggaactggatgtcggggctttggggaagaattgaggatgggggtgtcacagctccgtgccctcttctcctatcctaaggtcgatggagtccgcaaagccctgcaagacctggggctccgaattgtggaaataggagacgagaacgcgacgctggatggcactgacgttctcttcaccggtgaggctggggggaggcataggtcttggcacagggaagtagagtttgggagactcggccgtctggagccttgtttctaactcactcccgccctcaaacctccgcggcctcccggactcaggccgggagtttttcgtaggcctctccaaatggaccaatcaccgaggagctgagatcgtggcggacacgttccgggtgcggagcgggaccagcctagggagggagggggtgcaggtgggggtcggaagggcctgggcgcccgctgaggaaatgagaggcagagagcagcctatgtttgaagataccccatcacccctcccgcgcccctgaatacctcccttcgctctccctaggacttcgccgtctccactgtgccagtctcgggtccctcccacctgcgcggtctctgcggcatggggggacctcgcactgttgtggcaggcagcagcgacgctgcccaaaaggctgtccgggtgaggagggggcggggccaacgaaagtgggcgcagttctgggcccgggaggccgggagctgggaggcttaggaaattagccctaacccctgccctcaatgggctgtccatcttacatgaaagaacacaggagaaaataagaagttacaacagcaggactgggaacaggggtgattaatttgctcttccggagtttcaggaaaccccaaaggtggcacctaaactgtgactctaaggatgggtaggacagataggaggggctggggaaggtagggggttgaaaataactgcatgtgattccaaggtggaaattagcaaaggtaactaaagtacttagtgtctgacatatcgtaagctctatgtgcttgctgtcattattttccacaaatgtcagtccgtccccagcccttagtggtggttgagcaggcagacacagctgtggagaggttctgagactcgaacacttcctctttcctctaggcaatggcagtgctgacagatcacccatatgcctccctgaccctcccagatgacgcagctgctgactgtctctttcttcgtcctgggttgcctggtgtgccccctttcctcctgcaccgtggaggtggggatctgcccaacagccaggaggtgagagagggcaggaactccaacaccaagcaccatcagagaaaagagtttcaggctttcctagtgggaggaaggaagggtaccttctctagaagcctgggtggggccactctgagctggctggaagagtggcctggctcagcctgaggtctcactcccctctccccactccatgtcttccctgtgcaggcactgcagaagctctctgatgtcaccctggtacctgtgtcctgctcagaactggagaaggctggcgccgggctcagctccctctgcttggtgctcagcacacgcccccacagctgagggcctggccttggggtactgctggccaggggtaggatagtataggaagtagaaggggaaggagggttagatagagaatgctgaataggcagtagttgggagagagcctcaatattgggggaggggagagtgtagggaaaaggatccactgggtgaatcctccctctcagaaccaataaaatagaattgaccttttagactgggctgtgactggtgtcttactggggcaaagggatagggcagggctgaaacctgagtttggggtcagtgcagggaagaaggcctcttattcaaaaatcttgttaggtacttatcaactcattgcccaaccatgtcataggtacttgagcacaagatgaacaagacagaatttctatcatgggaagtgtgtccagggcagagaaaagagtgtatgggtggattgctcactgaatttatctaaatgttagatgattcagagactggtagattaccagtccacccctatttgataaagaaaaagaaatgacacttccagggacattcattttcattcattcatttaatgaggcttagcaatgatatcaaaagggtcagtctcctgacgttggggagctcacagtacatgcaaatttcttacaaattgaaatacaggttgtcatggaacaatttacagaaggctgtttctatgagggaaataaagggggtgtgccctagggcatcaaagtatatgcaaggggtggccaaggagggtcaccttcccagaaaaggccatacttgaactaaggataaataagaattagccaggcagatagtgtgaaggagggaaaggggtaatacaggaagaaggaattgcactgggcaaagacattttggggctagggagaattctctaaggctggcattttctaagatgtgcatgtggaatgacacaggtaagcctggagagtggacaaagtgctgtagtaccttgtatccaaagccaaggcacgtgggcacagagctgaagctaaggagagtacttcagttctgtaataagggctgtcaggagcagttatctcttgagtaggatctctctgacttcagggaggaaagcaagggtaggaggatgaggtggggctatgggtaatccaggaaggaagtgagcagagtacattcacgtggcagcgctgggcatggaatacagtgtgggtttgacagtgatgttaagatagaaagactggacttcatggctcattgtgtgggagtaagagagaaaggaggtctgcgtgactcccagtttctgggttgggcaactgggttgttaaagagaatacagaggagaattaagtgagcagcttcagagatgacaatgagttgggtttgacattcagagtgcgaaatgcctgaggtcagtcaggcagaatgtctaagtggaagtttgttaatcccaaatctgagatctgagccagagagagttctgagtgtcatttgcagaggagggggctgaggactgactgttgatgagagtgtcccagaagaagagaaagggacaaacctagaatggtgggaaatactgtagggatatggagcaaggaagaggagtccaaaaagaaaacaccagcaacaaagaaaaacagcttaaagaatcaggccgggcgcggtggctcacacctgtaatcctagcactttgggaggccggggcgggtggatcacgaggttagcagatcaagaccatcctggctaacacagtgaaaccccgtctctactaaaaatacaaaaaattagctgggcgtggtggcgggcgcctgtagtcccagctactcaggagcctgaggcaggagaatggtgtgaacccggcaggcggagcttgcagtgagggagatggtgtcactgcactccagcctgggcaacagagcgagactccgtctcaaaaaaaaaaaaaaaaggagctagggcttgattgggtatagagaggacactggtggtgagggagacatggaggttataggagagatgggagtaagtttagaagtaagaccagtggcagagacagcctggaacccaggtctcccaactcccagtctagcacttatttctataccatggtgccttcctcttccaggtgaggaaccaaggaggggagagggattatggggagctgggatcccctagcttgggaggtttggagtaagggcttcccttcaaactacaactgcatagatggtggaggcatcagcagggtccgctgtggacagccggcggggcctgctgagggctagatggtccagatccgcatagagcaggctctggaggaggaaggggaggaagacaagatggtctccacagtcttccttggggttcaggcctttttttttttggtccattttcctcagagattctggctatccccttcccatccccatgcccttaccggttcctggtccaggtcccctggaatcttgggctcttcctcctttactggcctctggggctcggttttcacaagtggagctatgtgggggggacagagctgaaggatggagagaaggtgaccaacgtgtctgctcccagcaagggctcagactcaggaattgaggggtggggagtgggcatgtaggagaaagaaaatggggtggaattagtctcaccaaatctagggagtggtcgaatcggttgcgggggcaggcgcctgtaagggacatatgagtctttgagaaccaccagtcttgtctcactggttctcctgggactcgccacgccaaggacagcccagcaacttgaaggctcagaccggaaacaacttagactctaccccaccgacagtccagcccaggctctaactctgctgcacttccagctcatctgctctggtggggctctactcaccagccagcggcctcgctcccacctttgacctctcccattcttcgccaagccaggaccagagctctaggtctagctctttcttttgcgaaggttctggtcctgccccttccacctctggtcactccccatttaacgaggccgggtccctcctgctcacctgtgcagccaccagaccaggcccaaagctcccagtccgagcaccaacccagcgcccagcagcgggatcaggagctggggatacacggaccctgggggaaaggcgtggcggggagggatgctgaggtcaggggtttgacgagggacagccagcagtcccgctcaagaacccccagccaaggccctcttccctcctccgggtatgtgtcggagttaagtacccttgtgcgcacaggcctgcacctaccatgggtaggcccgggggccttgcaataggtcctgtcccccagcacgtgaagcactgtacggctctcgtcctcgtggcggcccttgcagaaaaaagtgcccgagtctcccgcgctcaagaggagctccagccgccggataccagagtccagggagcgtaggcggccgacgaaaggctggaggggaggcacggtgggggtcccgctcgaagaggcccacaggatcggtcggcgtcctttggacaggcccttgcaggccgggaagctgggtgcccagacccagcggatgggatgagagactcctccgcaggagagattcacccggtccccagggcggccgtccagagaagctaggagaggccggaggctgtggttagggcacgtccacagggcaagacgaccctccatcccgtctcctctttctcttctctgttctgcactccagccatcctggatcttcccacacacaacccaccctactaggcggcccttatcttgcttcagcccctctgcgtctatcacaactctcccagggatcgcttacccccagggttcccttgggccctcgagagcagcagcggtagcagctgcagaaacacagccatggttaggatgtggtgaggagaagctgcgagcgaatcagcggcgtggggccggttggggggggaccggagggaagttaggcgtggggagaacggaggggctggggggctccgataagagagggggcggggccaccagctgcccagatccctttgggaatcctcgcaggcaaactcggagtcttcaaatggttctcacttaaaatgtgtgctcgggccatttacacaaatgctttggcctgcttaacttttcaggtgcgcctgtaatcccagctacttaggaggctgaggagggaggatcgcttgagctcaggaggtcgaggttgcagtgaactgtgatcaggccattgcactccagcctgggcgacagagccagccagaccctgtctcaaaaacaacaacaacaaaaactcctgttttgtaggggattgtgataacgaaataaagtaatacatgtaaactgcttagaatacataggatcactatgtaagtgcttgccattattattactatttctattctttttttttttttttttttttgagtcagagtcttgctctgtggccaggctggagtgcaatctcgactcactgcagcctccggctcctggattcaagtgagtctcctgtctcagcctcctgagtagctggaactacaggtgcatgccaccacacctaatttttgtattttcagtagagatggggtttcaccatgttggccaggatggtctcgatctcttgaccttgtgatccacccacctcggcctcccaaagtgctgagattacaggtgtgagccaccacacccggcctactatttctattcttattttagcttctacctcacctctctgtgcccatgctgttcctcctggcttggtaccctgcccaagttggcaggttttgactggggaggtgctttggagcaggtgcacacagccacacctaggacaattgctgctgctggactggagcaacaaggccacaccaagcgcaagtggagcacgggtgacatcctgagaaccttcatgggagcctgaggcagccctacttagcagacctgtggtggctctcctggatgagtagccccagcccctgcctctgctgctgtggcatcacagaagccatcagtgagtcacttattgctgagcaggtattggaaagaccgagtgggggctgaatggagattaatttgacccattcctcccccaatttccaccagcatgcccctatcaatgcccagcagggacccagggacccaaattcagcaattaatttgggccacatccttttgtccattttccaggaaccagcagaagctgccaccatggacactgtaaatcacagaggcctttgatgatgctcattcagaggactgagcagcaggactcttagctggggaccaggaagggcatcttggcctgaaaccaagaaccacaatggcattggccactagtggcacctgccttcccccatccctctctcccatccctactccccactcagtcctgctcagtgccttcccaccccttgtcttttctctggtcagctgcgtagtaagtgagaagggaggggctaccagaggcagggaagggaggagcctttgggtttataaattccaaaaaggccactcaactcctagagctggatccttgaaaatctactctatcagctgctgtggttgccaccattctcaggaccctcgccatgaaagcccttatgctgctcaccctgtctgttctgctctgctgggtctcaggtgagcacctgggggccccaaagacctggtttgcctggtcaggacctttacaccctgctctacccacttcccggccctacccaccactcgggatcccaacacccccagccccaactggctcagctctcctgtgccaccaagaccaggcttccctatgacagcctccttgctctatttctcaaaaagccaggtctccatccatcctccccacctccaagaaagacccatttctctcacctgccagggctctgggtcccctgttccccactccaaggtgtctcctccttggaaactctggtatccagttccccaaccagccccacttcaatatgcaactctccagagtctagcttacctgccttctcctctatctgctgtgctcagtaaggtgtcctctcgaagacctaggcatccagccccaggctccttttgtaacctaccctccccatctactccatcagggactcacatgttcagtctctcagccatggcctttcctagataccccctactcccctcctgggttgcatacctcctcccatacaggggatacaaactttctagatggttgcagtgacatctaagagcctccatggaaacagagcgttttcttgagccttctgaagaggggacaactgggccacttacctccagggtgaagtggatttcactgaggtacacttaccaggctcttccaccctcggaccctgcgtcaccaaatcttgcctgcccaaaccttgaattaactgaagcaggaaacttggggtgccaccttctgtatccaccctctccattttgataaggtgctaagatggaatctggtgatctgtctctcaggtatcattcctttctgctgaagagctactggggtgagaggattctattcaggtctggttcctcttgccacactcttgccagctccaggaggtgaagagtaaattgtaaattgctaaagctggccacagatggctttctcgccagcctcaagttccaaggcatttctgacagtgttgtaaccctcatgattttcatttttattatttctccttctttcaagtttccatctcctccttcaccatccacattctttccccatggtatcttcctcacattccatctatctccagccccatgtttttcttcatagttctgtccctcttgactcacctccaaacggggtggagtgacggaagatatgtagggcatgggcctttcacaaagcaacagctctacccttacctgccgcccactttccattttccctgcatcactcacctgctctgtgcttgctagaccaaacagccaaacaggttggagcacctacgggatgggctcttctccaccctccacccctgcccccagctcagcttatccccaggtaagtcagagaccccatcacctcagcctgacttgtgtcttcccagctgacattcgctgtcactcctgctacaaggtccctgtgctgggctgtgtggaccggcagtcctgccgcctggagccaggacagcaatgcctgacaacacatgcataccttggtaacatccccttccttagtggggtgaacagggaggtgggagcctctatgaccaggactgaggcccaaatgggtctaagactgagatggagaagcagaggattatagcaatgataatatttggccaaagatggttgtgtgccaggcaacatcctatgtctttgcatgcctttttttcaattaatgttcatgacaaccctgtgatgtgggtgctattattatactgagaaaacggcctcaaaaagagacagtaacacagccgggcatggtggctcatgcctgtaatcccagcactttgggaggccaaggtggttggatcacttgaggtcaggagttcaagaccagcctggccaacatggtgaaaccccatttctactaaatatacaaaaattagccaggcatggtagtgggcgcctgtaatcccagctactcgggaggctgaggcaggagaatcgcttgaacctgggaggcggaggttgcagtgagctgagatggcaccactgcactccagcctgggcgagagtgagactctgtcttggaaaaaacaaaaaaacaaaaaacagagacagtaacaggtccatggccagcaagtgatagaaccaggactgggggagtggtgggtaaggatgtgcagaaggaagatcagactaagaaaagagaaggggagggccagggacagagttgggaaggaaggaagcctaggtgggtggatggggtggggaggtggacacaggcatgccaggtgcccatcctggccgattccctgcccattcccacccctaggtaagatgtgggttttctccaatctgcgctgtggcacaccagaagagccctgtcaggaggccttcaaccaaaccaaccgtaagctgggtctgacatataacaccacctgctgcaacaaggacaactgcaacagcgcaggaccccggcccactccagccctgggccttgtcttccttacctccttggctggccttggcctctggctgctgcactgagactcattccattggctgcccctcctcccacctgccttggcctgagcctctctccctgtgtctctgtatcccctggctttacagaatcgtctctccctagctcccatttctttaattaaacactgttccgagtggtctcctcatccatccttcccacctcacacccttcactctcctttttctgggtcccttcccacttccttccaggacctccattggctcctagaagggctccccactttgcttcctatactctgctgtcccctacttgaggagggattgggatctgggcctgaaatggggcttctgtgttgtccccagtgaaggctcccacaaggacctgatgacctcactgtacagagctgactccccaaatccaggctcccatatgtaccccatcccccatactcacctctttccattttgagtaataaatgtctgagtctgataaaatgtacatttattataagaagacctaagggtcaggtcacctcccaggaaataatactctcaatctccctcccttacacaggaatccttcagggaggttccctgggaggctgggctggggaaaatggagaaacaggtttttcaggtcttcatcctcccttccagtgtctccaggtggcacacaacaactcatatcctaaatttaggccacacccctgatgtattgccaagaagaaggtgcggcctggcttgagggctctccagaaaggataggagaggtacatggagatggggcctgagaccctgtttcttca

SEQ ID NO: 349 - DNA, 3751 bp, Homo sapiens
cgggcgcagcagctggaacgggagtactgcgacgcggcccggagtcggccttgtaggggcgaaggtgcagggagatcgcggcgggcgcagtcttgagcgccggagcgcgtccctgcccttagcggggcttgccccagtcgcaggggcacatccagccgctgcggctgacagcagccgcgcgcgcgggagtctgcggggtcgcggcagccgcacctgcgcgggcgaccagcgcaaggtccccgcccggctgggcgggcagcaagggccggggagagggtgcgggtgcaggcgggggccccacagggccaccttcttgcccggcggctgccgctggaaaatgtctcaggagaggcccacgttctaccggcaggagctgaacaagacaatctgggaggtgcccgagcgttaccagaacctgtctccagtgggctctggcgcctatggctctgtgtgtgctgcttttgacacaaaaacggggttacgtgtggcagtgaagaagctctccagaccatttcagtccatcattcatgcgaaaagaacctacagagaactgcggttacttaaacatatgaaacatgaaaatgtgattggtctgttggacgtttttacacctgcaaggtctctggaggaattcaatgatgtgtatctggtgacccatctcatgggggcagatctgaacaacattgtgaaatgtcagaagcttacagatgaccatgttcagttccttatctaccaaattctccgaggtctaaagtatatacattcagctgacataattcacagggacctaaaacctagtaatctagctgtgaatgaagactgtgagctgaagattctggattttggactggctcggcacacagatgatgaaatgacaggctacgtggccactaggtggtacagggctcctgagatcatgctgaactggatgcattacaaccagacagttgatatttggtcagtgggatgcataatggccgagctgttgactggaagaacattgtttcctggtacagaccatattgatcagttgaagctcattttaagactcgttggaaccccaggggctgagcttttgaagaaaatctcctcagagtctgcaagaaactatattcagtctttgactcagatgccgaagatgaactttgcgaatgtatttattggtgccaatcccctggctgtcgacttgctggagaagatgcttgtattggactcagataagagaattacagcggcccaagcccttgcacatgcctactttgctcagtaccacgatcctgatgatgaaccagtggccgatccttatgatcagtcctttgaaagcagggacctccttatagatgagtggaaaagcctgacctatgatgaagtcatcagctttgtgccaccaccccttgaccaagaagagatggagtcctgagcacctggtttctgttctgttgatcccacttcactgtgaggggaaggccttttcatgggaactctccaaatattattcaagtgcctcttgttgcagagatttcctccatggtggaagggggtgtgcgtgcgtgtgcgtgcgtgttagtgtgtgtgcatgtgtgtgtctgtctttgtgggagggtaagacaatatgaacaaactatgatcacagtgactttacaggaggttgtggatgctccagggcagcctccaccttgctcttctttctgagagttggctcaggcagacaagagctgctgtccttttaggaatatgttcaatgcaaagtaaaaaaatatgaattgtccccaatcccggtcatgcttttgccactttggcttctcctgtgaccccaccttgacggtggggcgtagacttgacaacatcccacagtggcacggagagaaggcccataccttctggttgcttcagacctgacaccgtccctcagtgatacgtacagccaaaaaggaccaactggcttctgtgcactagcctgtgattaacttgcttagtatggttctcagatcttgacagtatatttgaaactgtaaatatgtttgtgccttaaaaggagagaagaaagtgtagatagttaaaagactgcagctgctgaagttctgagccgggcaagtcgagagggctgttggacagctgcttgtgggcccggagtaatcaggcagccttcataggcggtcatgtgtgcatgtgagcacatgcgtatatgtgcgtctctctttctccctcacccccaggtgttgccatttctctgcttacccttcacctttggtgcagaggtttcttgaatatctgccccagtagtcagaagcaggttcttgatgtcatgtacttcctgtgtactctttatttctagcagagtgaggatgtgttttgcacgtcttgctatttgagcatgcacagctgcttgtcctgctctcttcaggaggccctggtgtcaggcaggtttgccagtgaagacttcttgggtagtttagatcccatgtcacctcagctgatattatggcaagtgatatcacctctcttcagcccctagtgctattctgtgttgaacacaattgatacttcaggtgcttttgatgtgaaaatcatgaaaagaggaacaggtggatgtatagcatttttattcatgccatctgttttcaaccaactatttttgaggaattatcatgggaaaagaccagggcttttcccaggaatatcccaaacttcggaaacaagttattctcttcactcccaataactaatgctaagaaatgctgaaaatcaaagtaaaaaattaaagcccataaggccagaaactccttttgctgtctttctctaaatatgattactttaaaataaaaaagtaacaaggtgtcttttccactcctatggaaaagggtcttcttggcagcttaacattgacttcttggtttggggagaaataaattttgtttcagaattttgtatattgtaggaatcctttgagaatgtgattccttttgatggggagaaagggcaaattattttaatattttgtattttcaactttataaagataaaatatcctcaggggtggagaagtgtcgttttcataacttgctgaatttcaggcattttgttctacatgaggactcatatatttaagccttttgtgtaataagaaagtataaagtcacttccagtgttggctgtatgacagaatcttgtatttgggccaaggtgtttccatttctcaatcagtgcagtgatacatgtactccagagggacagggtggaccccctgagtcaactggagcaagaaggaaggaggcagactgatggcgattccctctcacccgggactctccccctttcaaggaaagtgaacctttaaagtaaaggcctcatctcctttattgcagttcaaatcctcaccatccacagcaagatgaattttatcagccatgtttggttgtaaatgctcgtgtgatttcctacagaaatactgctctgaatattttgtaataaaggtctttgcacatgtgaccacatacgtgttaggaggctgcatgctctggaagcctggactctaagctggagctcttggaagagctcttcggtttctgagcataatgctcccatctcctgatttctctgaacagaaaacaaaagagagaatgagggaaattgctattttatttgtattcatgaacttggctgtaatcagttatgccgtataggatgtcagacaataccactggttaaaataaagcctatttttcaaaaaaaaaaaaaaaaaaaaaaaaaa

SEQ ID NO: 350 - DNA, 3337 bp, Homo sapiens
cccaggcccgcgcccgccgcggccctgagaggccccggcaggtcccggcccggcggcggcagccatggccggggggccgggcccgggggagcccgcagcccccggcgcccagcacttcttgtacgaggtgccgccctgggtcatgtgccgcttctacaaagtgatggacgccctggagcccgccgactggtgccagttcgccgccctgatcgtgcgcgaccagaccgagctgcggctgtgcgagcgctccgggcagcgcacggccagcgtcctgtggccctggatcaaccgcaacgcccgtgtggccgacctcgtgcacatcctcacgcacctgcagctgctccgtgcgcgggacatcatcacagcctggcaccctcccgccccgcttccgtccccaggcaccactgccccgaggcccagcagcatccctgcacccgccgaggccgaggcctggagcccccggaagttgccatcctcagcctccaccttcctctccccagcttttccaggctcccagacccattcagggcctgagctcggcctggttccaagccctgcttccctgtggcctccaccgccatctccagccccttcttctaccaagccaggcccagagagctcagtgtccctcctgcagggagcccgcccctctccgttttgctggcccctctgtgagatttcccggggcacccacaacttctcggaggagctcaagatcggggagggtggctttgggtgcgtgtaccgggcggtgatgaggaacacggtgtatgctgtgaagaggctgaaggagaacgctgacctggagtggactgcagtgaagcagagcttcctgaccgaggtggagcagctgtccaggtttcgtcacccaaacattgtggactttgctggctactgtgctcagaacggcttctactgcctggtgtacggcttcctgcccaacggctccctggaggaccgtctccactgccagacccaggcctgcccacctctctcctggcctcagcgactggacatccttctgggtacagcccgggcaattcagtttctacatcaggacagccccagcctcatccatggagacatcaagagttccaacgtccttctggatgagaggctgacacccaagctgggagactttggcctggcccggttcagccgctttgccgggtccagccccagccagagcagcatggtggcccggacacagacagtgcggggcaccctggcctacctgcccgaggagtacatcaagacgggaaggctggctgtggacacggacaccttcagctttggggtggtagtgctagagaccttggctggtcagagggctgtgaagacgcacggtgccaggaccaagtatctggtgtacgagaggctagagaagctgcaggcagtggtggcgggggtgcccgggcatttggaggccgccagctgcatccccccttccccgcaggagaactcctacgtgtccagcactggcagagcccacagtggggctgctccatggcagcccctggcagcgccatcaggagccagtgcccaggcagcagagcagctgcagagaggccccaaccagcccgtggagagtgacgagagcctaggcggcctctctgctgccctgcgctcctggcacttgactccaagctgccctctggacccagcacccctcagggaggccggctgtcctcagggggacacggcaggagaatcgagctgggggagtggcccaggatcccggcccacagccgtggaaggactggcccttggcagctctgcatcatcgtcgtcagagccaccgcagattatcatcaaccctgcccgacagaagatggtccagaagctggccctgtacgaggatggggccctggacagcctgcagctgctgtcgtccagctccctcccaggcttgggcctggaacaggacaggcaggggcccgaagaaagtgatgaatttcagagctgatgtgttcacctgggcagatcccccaaatccggaagtcaaagttctcatggtcagaagttctcatggtgcacgagtcctcagcactctgccggcagtgggggtgggggcccatgcccgcgggggagagaaggaggtggccctgctgttctaggctctgtgggcataggcaggcagagtggaaccctgcctccatgccagcatctgggggcaaggaaggctggcatcatccagtgaggaggctggcgcatgttgggaggctgctggctgcacagacccgtgaggggaggagaggggctgctgtgcaggggtgtggagtagggagctggctcccctgagagccatgcagggcgtctgcagcccaggcctctggcagcagctctttgcccatctctttggacagtggccaccctgcacaatggggccgacgaggcctagggccctcctacctgcttacaatttggaaaagtgtggccgggtgcggtggctcacgcctgtaatcccagcactttgggaggccaaggcaggaggatcgctggagcccagtaggtcaagaccagccagggcaacatgatgagaccctgtctctgccaaaaaattttttaaactattagcctggcgtggtagcgcacgcctgtggtcccagctgctggggaggctgaagtaggaggatcatttatgcttgggaggtcgaggctgcagtgagtcatgattgtatgactgcactccagcctgggtgacagagcaagaccctgtttcaaaaagaaaaaccctgggaaaagtgaagtatggctgtaagtctcatggttcagtcctagcaagaagcgagaattctgagatcctccagaaagtcgagcagcacccacctccaacctcgggccagtgtcttcaggctttactggggacctgcgagctggcctaatgtggtggcctgcaagccaggccatccctgggcgccacagacgagctccgagccaggtcaggcttcggaggccacaagctcagcctcaggcccaggcactgattgtggcagaggggccactacccaaggtctagctaggcccaagacctagttacccagacagtgagaagcccctggaaggcagaaaagttgggagcatggcagacagggaagggaaacattttcagggaaaagacatgtatcacatgtcttcagaagcaagtcaggtttcatgtaaccgagtgtcctcttgcgtgtccaaaagtagcccagggctgtagcacaggcttcacagtgattttgtgttcagccgtgagtcacactacatgcccccgtgaagctgggcattggtgacgtccaggttgtccttgagtaataaaaacgtatgttgcaataaaaaaaaaaaaaaaaaa

SEQ ID NO: 351 - DNA, 1207 bp, Homo sapiens
acagagatcagcaaacagcttttctgagagaaagaaacatctgcaaatgacatgctgtttctgcagtttctgctgctagctcttcttctcccaggtggtgacaatgcagacgcatcccaggaacacgtctccttccatgtcatccagatcttctcatttgtcaaccaatcctgggcacgaggtcagggctcaggatggctggacgagttgcagactcatggctgggacagtgaatcaggcacaataattttcctgcataactggtccaagggcaacttcagcaatgaagagttgtcagacctagagttgttatttcgtttctacctctttggattaactcgggagattcaagaccatgcaagtcaagattactcgaaatatccctttgaagtacaggtgaaagcgggctgtgagctgcattctggaaagagcccagaaggcttctttcaggtagctttcaacggattagatttactgagtttccagaatacaacatgggtgccatctccaggctgtggaagtttggcccaaagtgtctgtcatctactcaatcatcagtatgaaggcgtcacagaaacagtgtataatctcataagaagcacttgcccccgatttctcttgggtctcctggatgcagggaagatgtatgtacacaggcaagtgaggccagaagcctggctgtccagtcgccccagccttgggtctggccagctgttgctggtttgtcatgcctccggcttctacccaaagcctgtttgggtgacatggatgcggaatgaacaggagcaactgggcactaaacatggtgatattcttcctaatgctgatgggacatggtatcttcaggtgatcctggaggtggcatctgaggagcctgctggcctgtcttgtcgagtgagacacagcagtctaggaggccaggacatcatcctctactggggacaccactcttccatgaattggattgccttggtagtgatagtgcccttggtgattctaatagtccttgtgttatggtttaagaagcactgctcatatcaggacatcctgtgagactcttccccctgactcccccattgtgttaagaacccagcaacccaggagcctagtacaatatagtgatgccatcccgtcgactctccatttaaattgtttctctttctgcataataaacatttgttaataaaaaccaaaaaaaaaaaaaaaa

SEQ ID NO: 352 - DNA, 1437 bp, Homo sapiens
gcttcctcagacatgccgctgctgctactgctgcccctgctgtgggcaggggccctggctatggatccaaatttctggctgcaagtgcaggagtcagtgacggtacaggagggtttgtgcgtcctcgtgccctgcactttcttccatcccataccctactacgacaagaactccccagttcatggttactggttccgggaaggagccattatatccggggactctccagtggccacaaacaagctagatcaagaagtacaggaggagactcagggcagattccgcctccttggggatcccagtaggaacaactgctccctgagcatcgtagacgccaggaggagggataatggttcatacttctttcggatggagagaggaagtaccaaatacagttacaaatctccccagctctctgtgcatgtgacagacttgacccacaggcccaaaatcctcatccctggcactctagaacccggccactccaaaaaccttacctgctctgtgtcctgggcctgtgagcagggaacacccccgatcttctcctggttgtcagctgcccccacctccctgggccccaggactactcactcctcggtgctcataatcaccccacggccccaggaccacggcaccaacctgacctgtcaggtgaagttcgctggagctggtgtgactacggagagaaccatccagctcaacgtcacctatgttccacagaacccaacaactggtatctttccaggagatggctcagggaaacaagagaccagagcaggactggttcatggggccattggaggagctggtgttacagccctgctcgctctttgtctctgcctcatcttcttcatagtgaagacccacaggaggaaagcagccaggacagcagtgggcagcaatgacacccaccctaccacagggtcagcctccccgaaacaccagaagaactccaagttacatggccccactgaaacctcaagctgttcaggtgccgcccctactgtggagatggatgaggagctgcattatgcttccctcaactttcatgggatgaatccttccaaggacacctccaccgaatactcagaggtcaggacccagtgaggaaccctcaagagcatcaggctcagctagaagatccacatcctctacaggtcggggaccaaaggctgattcttggagatttaactccccacaggcaatgggtttatagacattatgtgagtttcctgctatattaacatcatcttgagactttgcaagcagagagtcgtggaatcaaatctgtgctctttcatttgctaagtgtatgatgtcacacaagctccttaaccttccatgtctccattttcttctctgtgaagtaggtataagaagtcctatctcatagggatgctgtgagcattaaataaaggtacacatggaaaacaccag

SEQ ID NO: 353 - DNA, 2269 bp, Homo sapiens
cagtacattgagctccatagagacagcgccggggcaagtgagagccggacgggcactgggcgactctgtgcctcgctgaggaaaaataactaaacatgggcaaaggagatcctaagaagccgagaggcaaaatgtcatcatatgcattttttgtgcaaacttgtcgggaggagcataagaagaagcacccagatgcttcagtcaacttctcagagttttctaagaagtgctcagagaggtggaagaccatgtctgctaaagagaaaggaaaatttgaagatatggcaaaagcggacaaggcccgttatgaaagagaaatgaaaacctatatccctcccaaaggggagacaaaaaagaagttcaaggatcccaatgcacccaagaggcctccttcggccttcttcctcttctgctctgagtatcgcccaaaaatcaaaggagaacatcctggcctgtccattggtgatgttgcgaagaaactgggagagatgtggaataacactgctgcagatgacaagcagccttatgaaaagaaggctgcgaagctgaaggaaaaatacgaaaaggatattgctgcatatcgagctaaaggaaagcctgatgcagcaaaaaagggagttgtcaaggctgaaaaaagcaagaaaaagaaggaagaggaggaagatgaggaagatgaagaggatgaggaggaggaggaagatgaagaagatgaagatgaagaagaagatgatgatgatgaataagttggttctagcgcagttttttttttttcttgtctataaagcatttaacccccctgtacacaactcactccttttaaagaaaaaaattgaaatgtaaggctgtgtaagatttgtttttaaactgtacagtgtctttttttgtatagttaacacactaccgaatgtgtctttagatagccctgtcctggtggtattttcaatagccactaaccttgcctggtacagtatgggggttgtaaattggcatggaaatttaaagcaggttcttgttggtgcacagcacaaattagttatatatggggatggtagttttttcatcttcagttgtctctgatgcagcttatacgaaataattgttgttctgttaactgaataccactctgtaattgcaaaaaaaaaaaagttgcagctgttttgttgacattctgaatgcttctaagtaaatacaattttttttattagtattgttgtccttttcataggtctgaaatttttcttcttgaggggaagctagtcttttgcttttgcccattttgaatcacatgaattattacagtgtctatcctttcatatagttagctaataaaaagcttttgtctacacaccctgcatatcataatgggggtaaagttaagttgagatagttttcatccataactgaacatccaaaatcttgatcagttaagaaatttcacatagcccacttacatttacaaactgaagagtaatcaatctactcaaagcatgggattattagaatcaaacattttgaaagtctgtccttgaaggactaatagaaaagtatgttctaacctttacatgaggactctattctttaactcccattaccatgtaatggcagttatattttgcagttcccacattaaagaagacctgagaatgtatccccaaaagcgtgagcttaaaatacaagactgccatattaaattttttgttgacattagtctcagtgaagactatgaaaatgctggctatagatgtcttttcccatttatctaaatatggactgctcaggaaacgagactttcattacaagtatttttaattaattgggccagcttttcaaacaaagatgccacattcaaaatagggtatattttcctatattacggtttgcccctttataaatccaagtagataggaagaaagaagacaaactttgcatctcagtatgaattattcaatttatttgaatgatttttctttacaaaacaaactcattcattagtcatgtttatctgcttaggagtttagggaacaatttggcaattttgtggttttcgagattatcgttttcttaaagtgccagtattttaaaatagcgttcttgtaattttacacgcttttgtgatggagtgctgttttgttatataatttagacttggattctttccatttgcatttgtttatgtaatttcaggaggaatactgaacatctgagtcctggatgatactaataaactaataattgcagtaaaaaaaaaaaaaaaaaaaaaaaaaaaaaa

SEQ ID NO: 354 - DNA, 2179 bp, Homo sapiens
accgaccgcattgcggcttggttttctcacccagtgcatgtggcaggagcggtgagatcactgcctcacggcgatcctggactgacggtcacgactgcctaccctctaaccctgttctgagctgccccttgcccacacaccccaaacctgtgtgcaggatccgcctccatggagctacagcctcctgaagcctcgatcgccgtcgtgtcgattccgcgccagttgcctggctcacattcggaggctggtgtccagggtctcagcgcgggggacgactcagagttggggtctcactgtgttgcccagactggtctcgaactcttggcctcaggtgatcctcttccctcagcttcccagaatgccgagatgatagagacggggtctgactgtgttacccaggctggtcttcaactcttggcctcaagtgatcctcctgccttagcttccaagaatgctgaggttacaggcaccatgagccaggacaccgaggtggatatgaaggaggtggagctgaatgagttagagcccgagaagcagccgatgaacgcggcgtctggggcggccatgtccctggcgggagccgagaagaatggtctggtgaagatcaaggtggcggaagacgaggcggaggcggcagccgcggctaagttcacgggcctgtccaaggaggagctgctgaaggtggcaggcagccccggctgggtacgcacccgctgggcactgctgctgctcttctggctcggctggctcggcatgcttgctggtgccgtggtcataatcgtgcgagcgccgcgttgtcgcgagctaccggcgcagaagtggtggcacacgggcgccctctaccgcatcggcgaccttcaggccttccagggccacggcgcgggcaacctggcgggtctgaaggggcgtctcgattacctgagctctctgaaggtgaagggccttgtgctgggtccaattcacaagaaccagaaggatgatgtcgctcagactgacttgctgcagatcgaccccaattttggctccaaggaagattttgacagtctcttgcaatcggctaaaaaaaagagcatccgtgtcattctggaccttactcccaactaccggggtgagaactcgtggttctccactcaggttgacactgtggccaccaaggtgaaggatgctctggagttttggctgcaagctggcgtggatgggttccaggttcgggacatagagaatctgaaggatgcatcctcattcttggctgagtggcaaaatatcaccaagggcttcagtgaagacaggctcttgattgcggggactaactcctccgaccttcagcagatcctgagcctactcgaatccaacaaagacttgctgttgactagctcatacctgtctgattctggttctactggggagcatacaaaatccctagtcacacagtatttgaatgccactggcaatcgctggtgcagctggagtttgtctcaggcaaggctcctgacttccttcttgccggctcaacttctccgactctaccagctgatgctcttcaccctgccagggacccctgttttcagctacggggatgagattggcctggatgcagctgcccttcctggacagcctatggaggctccagtcatgctgtgggatgagtccagcttccctgacatcccaggggctgtaagtgccaacatgactgtgaagggccagagtgaagaccctggctccctcctttccttgttccggcggctgagtgaccagcggagtaaggagcgctccctactgcatggggacttccacgcgttctccgctgggcctggactcttctcctatatccgccactgggaccagaatgagcgttttctggtagtgcttaactttggggatgtgggcctctcggctggactgcaggcctccgacctgcctgccagcgccagcctgccagccaaggctgacctcctgctcagcacccagccaggccgtgaggagggctcccctcttgagctggaacgcctgaaactggagcctcacgaagggctgctgctccgcttcccctacgcggcctgacttcagcctgacatggacccactacccttctcctttccttcccaggccctttggcttctgatttttctcttttttaaaaacaaacaaacaaactgttgcaaaaaaaaaaaaaaaaaaa

SEQ ID NO: 355 - DNA, 2067 bp, Homo sapiens
aaaggccagcactcgctagcagtggcaggcagaggcccaggctgccgtcccctagagtcccaggttggctctgccagtcctgtcctttaccaaagatgaatgaagcaaatgtcatgctgccttattcagggaaggaggagcctgtcctgcctgtggccatgaccctgcctctcccaggcaggggcccgcgatgtggaactgctgccactgaggggggatccagttttgtcaatgcagttgtctctgttttacaagttggagtcactcttatgctgtacccagtttctaaactggagactgtgtgtgccctctgggctctgagtacccctgctttgggcttgggcctaggctgcattgaaaagagctgaaggttgtggcctttgcgctcctggcccagcctttgttccccactggagcagaaggggagatggacgacacggtgggggcatctggcctggccagtgccctgatcccagagagcccgaggaggtgtctcaggctgcctgagtcgtgacctgctaggccagagcccactccatctggtagaagggaaagcccatatgctaccaccagctgtgtccaaaaccgccagctctgttcttcctcagccagcctcgcccatccccttgaggtctcagcccctttcccttgtagctcctcccctggagggggaatggcagcaggggttggggaaacagcatctccaagcagcttagagttggccatatttacctcagcctgggcgctggtcctttcttccggcccctcccctccaaaatgtgcctattgctagagctcctccctctcaacacccagtttccttgggagttgtcattaaaggaaaaaaaaaaaaaaaaagccagtgcccagggatgggcatctccagggagctggggattagtgccaggcagccctgccagccatgcctacatccccatgggcacagaacaagccaaagccttcgttgtatgttgacgatgcacttttatgaatgtagtttctatcgctgtttttagccttttcacatcatgtaatgtgaggccttgtacttgttaatttatatctcagatcatatttgatggtttttatatatatcaattctagactgttacaggtgacggacgcctcaagagagagaagagaaaatgaaagcagctggttttgcagaagtgtgtgtcgcatgcgccagttgggcctggaccctcctgtgtccatccctgttcccccaggggctctatcagcccctgtaccccacactgccctctgaagacaacacaggctcctgcttccacctcggcccttgcccagggtggggcctggccctcatcttgaccaaagctgctgtgtggcagctcggcctctctacgaccccatcttggtggctgcacactcttcctggcccgcacccccatccccagtccctgttccccaagaggatacagagcacggtgctggctgactcaactgtgcgtcccaggttcagggtcttacagagctccaccccctggggtcttacctcactgggaatgtgttttgaaaatgaatttgaagacaagccaacaaaccctgcactccaaaaaagcaaaacagaccctaatttttttgtgccaaaaactgtggacatgctggctcagcatcctcaggaccaagttgttgcttaatttattgttttttaataactaatccagataaaaagttgtggggcttcagggtgacctgggcccaaaggttctgaagggcagttcctggcagccccaggcttgctgtgggaaggggccgtgccgtcactttctcatcattccatggggtgtgtctgcctgggccaactctgcatggagaggccagggctggggacagtccgcactctgccaccctcctgccccttccacccaccccagctctatgtctgtctgaattgtggatcgtgcagccatggttattgtggaactgtggaacctgcagccatagttatttgactatatcttgaccgagggcttgcagtgcaaagccaggccagtgttgcgcattacttacaataaaagggatcatttataaaaaaaaaaaaaa

SEQ ID NO: 356 - DNA, 562 bp, Homo sapiens
gagaagtcaggcacgtagctcagcggcggccgcggcgcgtgcgtctgtgcctctgcgcgggtctcctggtccttctgccatcatgccgatgttcatcgtaaacaccaacgtgccccgcgcctccgtgccggacgggttcctctccgagctcacccagcagctggcgcaggccaccggcaagcccccccagtacatcgcggtgcacgtggtcccggaccagctcatggccttcggcggctccagcgagccgtgcgcgctgcagcctgcacagcatcggcaagatcggcggcgcgcagaaccgctcctacagcaagctgctgtgcggcctgctggccgagcgcctgcgcatcagcccggacagggtctacatcaactattacgacatgaacgcggccaatgtgggctggaacaactccaccttcgcctaagagccgcagggacccacgctgtctgcgctggctccacccgggaacccgccgcacgctgtgttctaggcccgcccaccccaaccttctggtggggagaaataaacggtttagagactaaaaaaaaaaaaaaaaaa

SEQ ID NO: 357 - DNA, 3206 bp, Homo sapiens
ctggtgactcgcggcggcggcggcggacggcccagccggagcgcgaggggctcgggggggcgcggcggttcgggtcgcagagccagggaccccaggacccgggaggcggcgcagccggggccgccggaggagcgcgggtgacctggcggcggcgagatgccgctcgcccagctcaaggagccctggccgctcatggagctagtgccgctggacccggagaatggacagacctcaggggaagaagctggacttcagccgtccaaggatgagggcgtcctcaaggagatctccatcacgcaccacgtcaaggctggctctgagaaggctgatccatcccatttcgagctcctcaaggttctgggccagggatcctttggcaaagtcttcctggtgcggaaagtcacccggcctgacagtgggcacctgtatgctatgaaggtgctgaagaaggcaacgctgaaagtacgtgaccgcgtccggaccaagatggagagagacatcctggctgatgtaaatcacccattcgtggtgaagctgcactatgccttccagaccgagggcaagctctatctcattctggacttcctgcgtggtggggacctcttcacccggctctcaaaagaggtgatgttcacggaggaggatgtgaagttttacctggccgagctggctctgggcctggatcacctgcacagcctgggtatcatttacagagacctcaagcctgagaacatccttctggatgaggagggccacatcaaactcactgactttggcctgagcaaagaggccattgaccacgagaagaaggcctattctttctgcgggacagtggagtacatggcccctgaggtcgtcaaccgccagggccactcccatagtgcggactggtggtcctatggggtgttgatgtttgagatgctgacgggctccctgcccttccaggggaaggaccggaaggagaccatgacactgattctgaaggcgaagctaggcatgccccagtttctgagcactgaagcccagagcctcttgcgggccctgttcaagcggaatcctgccaaccggctcggctccggccctgatggggcagaggaaatcaagcggcatgtcttctactccaccattgactggaataagctataccgtcgtgagatcaagccacccttcaagccagcagtggctcagcctgatgacaccttctactttgacaccgagttcacgtcccgcacacccaaggattccccaggcatcccccccagcgctggggcccatcagctgttccggggcttcagcttcgtggccaccggcctgatggaagacgacggcaagcctcgtgccccgcaggcacccctgcactcggtggtacagcaactccatgggaagaacctggtttttagtgacggctacgtggtaaaggagacaattggtgtgggctcctactctgagtgcaagcgctgtgtccacaaggccaccaacatggagtatgctgtcaaggtcattgataagagcaagcgggatccttcagaagagattgagattcttctgcggtatggccagcaccccaacatcatcactctgaaagatgtgtatgatgatggcaaacacgtgtacctggtgacagagctgatgcggggtggggagctgctggacaagatcctgcggcagaagttcttctcagagcgggaggccagctttgtcctgcacaccattggcaaaactgtggagtatctgcactcacagggggttgtgcacagggacctgaagcccagcaacatcctgtatgtggacgagtccgggaatcccgagtgcctgcgcatctgtgactttggttttgccaaacagctgcgggctgagaatgggctcctcatgacaccttgctacacagccaactttgtggcgcctgaggtgctgaagcgccagggctacgatgaaggctgcgacatctggagcctgggcattctgctgtacaccatgctggcaggatatactccatttgccaacggtcccagtgacacaccagaggaaatcctaacccggatcggcagtgggaagtttaccctcagtgggggaaattggaacacagtttcagagacagccaaggacctggtgtccaagatgctacacgtggatccccaccagcgcctcacagctaagcaggttctgcagcatccatgggtcacccagaaagacaagcttccccaaagccagctgtcccaccaggacctacagcttgtgaagggagccatggctgccacgtactccgcactcaacagctccaagcccaccccccagctgaagcccatcgagtcatccatcctggcccagcggcgagtgaggaagttgccatccaccaccctgtgaggcaccagggcattcgggccacagggcggtgctagcttgacagagtcagcatgcttcccagagggagcaggccggaaccacagggccagagggagctggaacccgaggggccggggaagctgccagcccagaacacccctaatgagggtgtgagaagtgccttctccttccccaggatggactcttctcggctcaggctctgctggtggaaagcgattcactgtataaacttttttttatgaaaaaaatggcatcaaccaccatggatttttacaagatccatttgcctttctgggagcagaaacagccattgcggccccaggaggggaactgagtcacgctggggctctctgagactctttagagcagctttgggatcccaccctggggacccccatgattggccacctgtagccatctgcacacacctccgagacagtccagtgtcacctctctcagagcatctggctgtttagcagaactcattctatccccaatcagctccttttccgttctgttctgctgggagttctagaaccacttcctgctacaggaggggtctcatgtcctgctggcttccagcttcaggcaccagcatccaccttggctctgccagtggatcccctgcggtcaggctgggcagccccagagagaggatgtggaaagcactttttggctgacttcatctggggttggcaacaggacagagttcacaggaggccagtgggcgggccatgagggacagggtcttttttcatttcttcctcagctggttactcagggttcatctgtccatggcctttctaataaactgttgagttgaaaaaaaaaaaaaaaaaaaa

SEQ ID NO: 358 - DNA, 3962 bp, Homo sapiens
ccggaaacagcgggctggggcagccactgcttacactgaagagggaggacgggagaggagtgtgtgtgtgtgtgtgtgtgtgtgtgtgtatgtatgtgtgtgctttatcttatttttctttttggtggtggtggtggaaggggggaggtgctagcagggccagccttgaactcgctggacagagctacagacctatggggcctggaagtgcccgctgagaaagggagaagacagcagaggggttgccgaggcaacctccaagtcccagatcatgtctctgtggggtctggtctccaagatgcccccagaaaaagtgcagcggctctatgtcgactttccccaacacctgcggcatcttctgggtgactggctggagagccagccctgggagttcctggtcggctccgacgccttctgctgcaacttggctagtgccctactttcagacactgtccagcaccttcaggcctcggtgggagagcagggggaggggagcaccatcttgcaacacatcagcacccttgagagcatatatcagagggaccccctgaagctggtggccactttcagacaaatacttcaaggagagaaaaaagctgttatggaacagttccgccacttgccaatgcctttccactggaagcaggaagaactcaagtttaagacaggcttgcggaggctgcagcaccgagtaggggagatccaccttctccgagaagccctgcagaagggggctgaggctggccaagtgtctctgcacagcttgatagaaactcctgctaatgggactgggccaagtgaggccctggccatgctactgcaggagaccactggagagctagaggcagccaaagccctagtgctgaagaggatccagatttggaaacggcagcagcagctggcagggaatggcgcaccgtttgaggagagcctggccccactccaggagaggtgtgaaagcctggtggacatttattcccagctacagcaggaggtaggggcggctggtggggagcttgagcccaagacccgggcatcgctgactggccggctggatgaagtcctgagaaccctcgtcaccagttgcttcctggtggagaagcagcccccccaggtactgaagactcagaccaagttccaggctggagttcgattcctgttgggcttgaggttcctgggggccccagccaagcctccgctggtcagggccgacatggtgacagagaagcaggcgcgggagctgagtgtgcctcagggtcctggggctggagcagaaagcactggagaaatcatcaacaacactgtgcccttggagaacagcattcctgggaactgctgctctgccctgttcaagaacctgcttctcaagaagatcaagcggtgtgagcggaagggcactgagtctgtcacagaggagaagtgcgctgtgctcttctctgccagcttcacacttggccccggcaaactccccatccagctccaggccctgtctctgcccctggtggtcatcgtccatggcaaccaagacaacaatgccaaagccactatcctgtggtacaatgccttctctgagatggaccgcgtgccctttgtggtggctgagcgggtgccctgggagaagatgtgtgaaactctgaacctgaagttcatggctgaggtggggaccaaccgggggctgctcccagagcacttcctcttcctggcccagaagatcttcaatgacaacagcctcagtatggaggccttccagcaccgttctgtgtcctggtcgcagttcaacaaggagatcctgctgggccgtggcttcaccttttggcagtggtttgatggtgtcctggacctcaccaaacgctgtctccggagctactggtctgaccggctgatcattggcttcatcagcaaacagtacgttactagccttcttctcaatgagcccgacggaacctttctcctccgcttcagcgactcagagattgggggcatcaccattgcccatgtcatccggggccaggatggctctccacagatagagaacatccagccattctctgccaaagacctgtccattcgctcactgggggaccgaatccgggatcttgctcagctcaaaaatctctatcccaagaagcccaaggatgaggctttccggagccactacaagcctgaacagatgggtaaggatggcaggggttatgtcccagctaccatcaagatgaccgtggaaagggaccaaccacttcctaccccagagctccagatgcctaccatggtgccttcttatgaccttggaatggccctgattcctccatgagcatgcagcttggcccagatatggtgccccaggtgtacccaccacactctcactccatccccccgtatcaaggcctctccccagaagaatcagtcaacgtgttgtcagccttccaggagcctcacctgcagatgccccccagcctgggccagatgagcctgccctttgaccagcctcacccccagggcctgctgccgtgccagcctcaggagcatgctgtgtccagccctgaccccctgctctgctcagatgtgaccatggtggaagacagctgcctgagccagccagtgacagcgtttcctcagggcacttggattggtgaagacatattccctcctctgctgcctcccactgaacaggacctcactaagcttctcctggaggggcaaggggagtcggggggagggtccttgggggcacagcccctcctgcagccctcccactatgggcaatctgggatctcaatgtcccacatggacctaagggccaaccccagttggtgatcccagctggagggagaacccaaagagacagctcttctactacccccacagacctgctctggacacttgctcatgccctgccaagcagcagatggggagggtgccctcctatccccacctactcctgggtcaggaggaaaagactaacaggagaatgcacagtgggtggagccaatccactccttcctttctatcattcccctgcccacctccttccagcactgactggaagggaagttcaggctctgagacacgccccaacatgcctgcacctgcagcgcgcacacgcacgcacacacacatacagagctctctgagggtgatggggctgagcaggaggggggctgggtaagagcacaggttagggcatggaaggcttctccgcccattctgacccagggcctaggacggataggcaggaacatacagacacatttacactagaggccagggatagaggatattgggtctcagccctaggggaatgggaagcagctcaagggaccctgggtgggagcataggaggggtctggacatgtggttactagtacaggttttgccctgattaaaaaatctcccaaagccccaaattcctgttagccaggtggaggcttctgatacgtgtatgagactatgcaaaagtacaagggctgagattcttcgtgtatagctgtgtgaacgtgtatgtacctaggatatgttaaatgtatagctggcaccttagttgcatgaccacatagaacatgtgtctatctgcttttgcctacgtgacaacacaaatttgggagggtgagacactgcacagaagacagcagcaagtgtgctggcctctctgacatatgctaacccccaaatactctgaatttggagtctgactgtgcccaagtgggtccaagtggctgtgacatctacgtatggctccacacctccaatgctgcctgggagccagggtgagagtctgggtccaggcctggccatgtggccctccagtgtatgagagggccctgcctgctgcatcttttctgttgccccatccaccgccagcttcccttcactcccctatcccattctccctctcaaggcaggggtcatagatcctaagccataaaataaattttattccaaaataaaaaaaaaaaaaaaaaaaa

SEQ ID NO: 359 - DNA, 31737 bp, Homo sapiens
gaattcagtttggaacctaagcttctgaagctgctctcaccaccactgaaaccactggcggtgtctctttcctcttacagcacctcggtggttctcaacctgtcctcagagcctgggcatggggcccaggtactggtgttttataaaagcttctcaggtgatgctgaaacgcagtcagagccagaacacgtggcctgagggtgtacaatccacagtcagacattcaccaccctccctctgtcttaactactcctctgaccctcttggtgccattttcaaatagcggagcaaatacctacatgataactagaataaggaacctgagtatttgagaccaaggtgcttcattcttcagaggtggtgccattttcaccttcagaggtgggggaatcctaaaaagttccagtgttctgtgtgacttttcgatgtacagagatgacagagtggaatctttccctttttctttcaccttccacaggctgcctgagacctctagcctcttctaatggctatgtaaacatctctgagctccagacctccttcccggtggggactgtgatctcctatcgctgctttcccggatttaaacttgatgggtctgcgtatcttgagtgcttacaaaaccttatctggtcgtccagcccaccccggtgccttgctctggaaggtaacacatctcattctttcggaagttgtattttgtattattaaagggaggaagaagatcagtaggaggaagagctgtgaattatgatgggcaataacttttcttctctgaatacatctttctcacttttctccagagcagagatcagctgccgtgaagccatatttacaattagatgtaaaacttgcttccctcatccttaggcttaaagaggagagcagataaaagaaaaagttgcgaacattaaaggttaaattacaaaatattgcaaagttaaatgaaatgtcttcaaaaattaattttctctgcaccaaatgggaacagattgtatcatgtcattaatcttacccctcgttttattgttgtgtcgctgtttcctccatatttccatgcactttatggcttagctgtaaatgttttgctgcaagcacacccttggatgcctgaaagcaagagctctttcctccctgtttttattaaatctctatgactatagattgtgattcacgaaagaccactaatcagtagtatgaagtagtgagaaggacagggcttccactggcggagtcaaggcagtgtctgcaggggaaaagcctgtaaacacttctgctaggcaagttggacatgctggttcagctcttgctttaactcagatcttgaaagtatgcccgaagagaacaagctccaatgtgtttctcagcatctgagtatagtgggtaggaggggtctatatggggaaagaaaaaagtgaagaaacctcaagtcaggagccgcttcaaagcctatttgcagccttgtttgggaaacaaagcaaaacaatggaatatggaaacaaatgagttcttacaagtttacagcatctctacaagtgtgcacctctgtgtgggaggaagtcagggtaggacgtgtgtcatggagggtgactattgctcagaaggatcagagacggcctctctagggatgtggagtggggttggctggagccatggaatctctttggagaaggatgggggaaggagggaagggagccagaaggccagcccttcccattggttttgtcatactcctaggctgatcattagaactcccctcactccacttcccacccatcgcaaatcccccagggaattggagcctagcctagagatgccagataaaatacaggatacacagataaatttgaatttcagataagcaaataatgttttaatatgagcatgtcgatatatgggacatacttagtataaaagattattctttgcttatctgaaattcaaatatattaataactgagtgtcttgaatttttatttcctaaatctggtcgccctagcctcaagggacaaggtcatctcttttgcttccagtgggaatagccttcctgttatctggatgctgctggtaggccgtggacctctgatggaaggggctcttccctagttctggaggcttctccctactcagataaccagacagagagggccctttaaagatatcgtttttacgattttatcaatttgaaatgcctgttttcaaatcttttcaaatttggtttaaatgtgtttcaagcagtcaggttctgataagctttattttgggacttgtaagcagtctttatggagactagagaatatgactggataggcataaaacaaaatctaaggttaaaaacagggagccgagagtggctttgggttgaaaatgagtcttctggcctaacatgtcccctttcctctgccatcctccactatgagtagatgggaaaaccctggctgacagctgcctgtgccaggaaggccacttagcgtcttttttccctagggtttttgtttttttaataaggtttacatctccgttttcaatagacatccctttaaattgtctgatggcatttgttggtgagcactttcaatgcaacactggctaaaggtacaaagtggtgattctaaactgagaggcacagaggggactaaaggattatttctttcaagacttgatagaaactgggttgaattaagcagtgggttaaactaagaggtaaggattcgtgaacaagttatccagatgtgcctagaggtttgcatttctctcattctcactttaattgtgtatcatctttttaaaagatggtgccttagttatgcactgttgtcatagggtattcaacatagacgaactgtcacaaaggaatcgacccttttcatagatcacccacacttttaactcctcatctttctgtcttcctaagcacacgatttgcacaatttgatttttcttgatgacatagtgaaaattattgcactgggctgtggaattatgatgctctaaggggcttttagatatgttagaactctctgacccctgcagtaatggtgtggacagttctgctgtggaagtctttctctttgagttttctgtccctttcccgttcctctttcactgtcaatccatcagctgtcagtgtgcctgtcacactcagggtacctgtcgctgcagctgtccctcacccccaatttcttttctaacctgctgtgagccaggaggaaggttcaccaggctggtcatggagggagcatagcatatcaattaccagtgcaagctgacctcagacggactggcttcacatcctggcatcctactcaatcacttcacctggggcaagtcacatagcctctatcagcctccatttcttcctctgtaaaatgggggtgatgagtcctacttggcttgtgggactgggaagagtcagtgaaataacaaatccacccatttaatgaagtgcccagcccatagtatgtggtcaatcacttgtctgttgttattaatgcactaagagttttatataaaatctcaataaataagagagaacctagcatgactctctgtgaatacggtctccagacttttagacatgtacactgtgacacaattttggttgttcaggtgctattttggttatttgtgtattctaagctgtgtctacgtaagatgactcagataccaagaggacatactgaacaataagaacagccaccattaattttgagagcttactacataggtgtcaggctactgctcaaagtgtttgacacagtgtctcctttaatcttaacttttaatgccatttggaagcaggtactattgaccccctttagccactgagcaaacccagccttctaaaggttcagtaacttgctcagtcacacagctaggaagagggggagctgggactatagcatggatctttgtcacttcaaagctcatgttcttgatcaccaaggtacattgtctatttaacatgttctgattacaatctaacagggggaaagcaatttgatactcttataggcattttcttaaagcaaaacaataaaataattattgcatagaaaagagtttgtctttctagtttagttatcatccctgagaaatcccagcagcagagaggctctgctgcccgctgggtggccgcaagctcttactgctgccgccccacaatgcccgttagtctcccacgtggccatggaaccccacttcagccagtgagccaggcagaggttgttggcctccttttacagatgaggacatgaccccttggagaatgccatgacttgtcctgacccttcaactcttggcgcatggtctctgccgcatggcacctcctctccctagcggagtggagagcactttgtgagggtcagtgtttgagtgacagctgtcacactgacatgtcaacaatctcatagttgatacctggcttcatgaaggagttgataatttggaaggaaacgctttggcagcctcaccaaaggtggcaagagtttggaagcccactacgaagatgtgggtcgcatgttttaaggcctgcactattgcactcatggatagtgggaagattctggagcgtatatgggtccccatagctgtgttgtcagataaagcacccaaaatttcaaagcattgaaccagaatgatggctgtaatgttttaaaatcaatgactgtataaaattggagctggaaggagcttcgtgcatccctgtgtgtccctgtgggccctggcttgctgtgggcctgtgtgctttgccttgtctgcgtgtatcttagtgctttccactctcgggttctcttcctccctgaggccctcacctccatctgtctctttcatgtgcgtgcacacacacgcacacattgaatgcaagaaatctttaaaaactaaaaaagctctgacaataaatgtggggaatttctcattgttaagtgctaagaactcagtttatgttgtcaccagtgactattgaacacctgctaggccagagcaacaccgaattgggcactggggaattacaaagaaaggaaaggacataattccttcttttgaagagtttacagtctagagggagaacaagatggcaaagtccatttcctagagaatagcctcattacagatggcagccactacacacacagctacttttaccaaagggcacacgggggcttctgcatttagaaagggtagaaggacagtttcaggagatgatatcacaattgtaaaatgaaattttctacccaggcatttatggcatttttgtttattttccccagagaccaatagtagcatgtttctgtctgttctgtctccacttgagccttggggaaagagaaagttctgaacatctcactcctagggaaggactgtgtattttgaagtgtggtggagctcatcggtatagacgcagcctgccctagtgtgtgtgagaggctccagcacagtggtttgaagggtgggaatatggaaggatattgaggagcataacaataagtaaatgaaccaaccatgtagcacatagttgcagggatggacacagacacacacggggcagtctaggaagaagaggcactaactgcccagaatccccaagacactgtgtgcttggggctgtgagagctgctggttatgagcggttgcaggaaagggctcttctctacaggggataggaccacccacaacccgttggtatctggaacattctcttcacattcaggttttcagacagcctggaaacagcacagaggtgctgggtatccagttatagaaatttctgggggcagctctttcaacagcagagatcacagcactgtgcctctttgagacaggttgcaagggtcagaagaacagacgatggaagcaaaaacttggaatttggggtccttaattgtagctgccatccacttaaagattcctgttgccctaagtgctaaattagaggacttaggatcctggatcctttatccagaagtcctcccttcaacaacactctagataaaaagatggaatcaagtttagaaaggaccaatcaaacatttagggagattagagtttaaaagaaaccaaaatcagtgtcatatgctatttcacgtaagtgcctctgaggtgtatggtttcattcagccaacatttttatgcctatatgctgagtattttgcaaggtccagtgcaaacagtggcaaatgagttgtgcaaagtctctgtccccctggggctcacatagcatgtgttgctattcctgaaattgcactctccacgcaggcagagctaggttctaaatattacatttgtaagttatccagggcctcccgtggtagagaagattgttacctacactgaaggccacctagaaggagttctaaggcaaggtctccatggtttcgaaagaactgggagggtcaggctggtgagtcactctttgctgtgtggggttggctctgagacgtgatgcctggtctgctttcagaaggcagccgggttttcagggaaagcagtgagcatgatcccagaggccccagggagtctggtctgctcatttgtttgcttttcccaaacaggggaataaatcactgtaggatctgcaggtacctaaggtttcatttgtaatgacttgggcagtggcttccctgatgctgacaatttcaaaagattttttcagcctcgtggctgccatttctcccaggaaccagtaaacccgacccccttggaagccgaacatctgaaagtttaggtttttaaatctgcccagtccccaaacccagaatgcccccaggtgactcccctcagccccattcatctcagagcccacatggacagagatgtagttttcatcagacagcatccaattcaatcacagggaatgcagcagtgtgatttcctaagaacctacaagtgcccaggggtcctttcagctctgtatccttttataagaaaaggaggaaaaataagaaactgaagaaccttgtttggccaaatgtgaaatgacttgaaaggttccaatttgggatcaaaactcaaagccagcttggatgtggagggctccccagctctcaagctacatttgcagtgtactttgttcctgagtcaaaacacgttcaggtacaagaggcgcctggtataagaggcgcctgaagtgatttctccctccaggaatcctgccttcactcagaagtgcctcagaacttcaaagtgaatcctgtgtagggaacaggaaagacacagcagagaatccaggcctccttggatgacagagtctaccctgatcctggaggcaggctgcaggggacactcaaagggggtgtgatgagggcccaccctgggacaggctgctcccgttttacaaatggaaacttcagacataaagaggagtccataccgttcccaataaggtcgtaaattactgttcatgatgaggcccagtgtcacctcggtcacttccccagacccgaatcagggccactctattctccctatggagttcctatcttcctcctgccacctgtccccagacatgtgggggagacgcagggtctctcagctccctgcccggtgatccacaataagaagcatgagctcgggtccatcctctgataaacttgaaactattctgcattggatttgaagtagcacatgggaaatgacagaagaaaggtcatattggggatttcatgccactgattttgaattactggtcatagaatacagagcttaggcatcaccaatttccctttctcctaagccaacccaccgtaccccagtgtatccttgtagagatgaatgggaagtgccagagagtagcaggcttggccacagtggtggcctgggagcaccagtcaaggtccagcatccaccctgggctctggcaccatcaggctgccttgagtagggaaggcccatgccacttgatcttcactcccttccttgcctatgtttttttttgttttttaattgtaaaaatgtttttgtagagacttggtctcgttgttttgcccaggctggtctcaaactcctggcctcaagcaatcctcccacctcggcctcccaaggtgctgggactacaggcatgaaccaccgcacccagcccgtcatctacattcttgaacagggacaaataatatttcaaatttcttcctcctgtgaacaactgactgcatggcagaaagcaccttgttcctccctgcactcctagccccggcacatgctttatattctacaagttgcagctgttataactaaaacttcttttgattcatttgacatttttggatgcctactctatgccaagcaccgtgcaggtagtttatttcatgatctctcctaacaacagtcacgagaagcaagtgtggcgccagcctatagatgaggaaactgaggttcagacagctccggtgctccttccccaaggtcactctgtccacagcaaccggcccctgtgcctcctgagcccacaccttctactgacactactcttctaggccttctaagacccagactacctgctggaaattttgatctgggttctaatcctagctctgtccatttcctcagacagaatggaaaggagttggaagggttgatcttagaggctccttcctggtggtcagattctttgattctgctcttaaccagaactcacactgttctcagagaggctgccctgtccctggctggctctggaaggcaggtggcaaaatgaaggggagaggtgctaggagagcttctccccccaatgctggctaacagagttttcctgaaattcatgtttatacagtcagcctgtgagcctggagtcatctgcaggaggagagcggcaggaaaggaagagatgtgtggtgagggtcatcttggtaacaggcacatcacctgctatctttagtcagcctctagacaactccaggtattactgtcctctattttcagataggaagcaggcctggtcacaccccttggccttagggagtaggctgcagagccaagattctaaaccagccctgacctgactcctaggctgtgctttctcctgtaccgcactgccttccgtgggagagaccagcccggccacctgagtaatctgcacagccacccattgatgacttctttaccattagtgttctcaggaacctgaatttttatcatgtaaaaggctttggaggagggagagggcaataccatgtgatctgccccaagctacactgtatacaatggtgagcaatgggggaatttccatttcttccttcccttcctccctccttcccaggcaaggcgctggcgccaaccagggatgtacaatgtgccaagtggccactgctattagagactcaagtcttgtgcacctctgtgtaaatgataatagcagtgaccacctggacactgaatacccactcagcctcccacagttctgaataaacccgctggccagaggcgtggtctcaattagcctctcctgggccctcaagctccctgcaggcttatccgtgatcctgccagtagctggacccagcataaaatttaatcggcagaaaaggaagaaaagggcagcaaatgccttttttacttgatatagcaggggagcttctttccatgggacagtagagggagggcttctgattaatctgcttgccctaagctctgcccttccctcgcctcctctagctaatacaaggttaggtaatgcttggccaggggttctggaacataaggctctaaggccctgggagttccctgggaagccccaggtaactttgacccaggctcccccagccccaatggctctgttttatatatttacatattatgttctcactcaagatttatttgaaggaagagtttgctggcgtgaaatatgaaaatcatacatcgggttctgcctccttaggaacttgagaccagagcaatgaaatgattggcttgggtcatagaaacctcccaccccccaacctctttagactcccagccttcaaggatgtaagtagatggctaatttataatcctaattaggaatccagcttacatcagtcaaagttttacaggatttttagatcttattctcaaaagaatcttcagttccctttgaagataaatgtgtgttccctgggcctaggaaagagaaaatctcatgccctttccctcctgtgtttctccctgtctgaaacaaacagaggtccctttgtgaactgaaaatgaattctatggcctgggcacatacattagtacataccatccccttttgccattttgttccctggcagtgaaaatccctgtgtctggtgctgttcgtgttactatcaccttgcctgtgaccctggtgggtgttttattagagggaaatgcaaaatagcaagcaatcctgttaattcattgttcaccagcaatagtaaattattctaatatcatttccatgtactgttcatatattacagcagagtgattaccagaaaatagctgcttgcatgccatacagcattctcaaggatcactgtgcttaattttctcttcttcttttacaataagtaattgccactgtagcttccttctcttcttggtcacacatctctctcatactcaagatagattgtgccatggcatcaagaagcttcattattcttttttcttttcctatatcaaatccagaaacactgatctttttgtcttaagaaaaccaagagaccttattcctttttttcaagtagatccaagttttcaggcattcctgctattactttttagactctttttctcttgcgttttctgattcccaacatgatagatggtcctcatcctctctctccgaatctgctgttcactagcttaagacccttggcaggctcctgtctcagcaccttgccttccttttagccttggtggaaacacaaccattaaccctctgtctctcctggactcctataattatctgtctctttttttttaatcccgtgtaagtgcagagatctagactgaggtcagaggaagaagagaggtgattcttctcccaccaaaggggaaagaaagctgacagcttcattggtttgaactacctctcccgccaaatcaagaaatgaagagatcacccaagggaggactcagataatcccctctccccaccattcagagatgggatttcaccagtctcaagcccaactctacccaagcccccatccatggttctcacctgggcaggtcgcctgtcccggggcttgcatgagcctggcaggattccctgtttggagcagggggtggagaacatgtccctttctttcactgagttcacagttctcaccaaaatataatcctcctttgccctgtagtcccctcctatttttgcaaatccacagacatgcaagctgaggtctttattttgtgatgcttaaatgtcaggttactgaaggaagtgcagagctaagcaacagcaaagctgtgaccaggggtatgagcctctagcttatgccacgagtgggacctcattatgctcagaaaatagatgaccggtacaaatgggagattctcagtgtttgtccttaaactctagagtatcttctctatccctgctccaggcaggatttatttctttctttcctctctgggaagtaagatgacttgtatttcatagtaataaaacctcttgcagtcaggtggaacacagaaggtaataaatgcctgcagtcatttcaggggcctttttcaggctgggagtcactcggcaatattcggcagggtgtttggggtcattcctctctgttgttcctttcttccttctccaccccagttcccacccccatctccactttccttcataaaccattgccgtaattccctgccttttctcccaaattaattagacatttggagtgatgcgtgggtaaaatagtcatacctttctattcctatctttttgtctcatgtcattcatttttttcatagaaatggtaaccatcatgcctatgttcatgatcattttctttttttttttgtactgaagcaagtttttgttgtttttggcttgcgttctgtaaaaagataatgcctgactccgaactgtgcccacatcctctaaagttagagtgtgcagagaggacagagccttcatcccatggcacattttttttcttgtggcttctgaagaaaagtccaggactttgtttacattctggccagtttgttctttgatggatgacaacctaatgaattttctttttctttttcttttttttttttggaaacggagcctcactctgtctcacccaggctggagtgcaattgtgcaatctcggctcactgcaacctccgcctctcaggttcaagcgattctcctgtctcagcctcccaactagctggtactacaggctgcactgccatatctggctaattttgtgtttttaatagagatggggttttttaccatgttggccaggctggtctcaaattcctgacctcaggccttggcctcccaaagtgctggaattacagacatgagcctctgcgcccggcccctaatgcattttctaaccccgtcttctccattcctaggaagggatttcattggtccaggccttaagaaggggaagcatgactggagtttaaaaaaaaaaaagccaattatatggaaattcatattttaaaactagtccttagttcaagctatcacaagtaaacacctgtgcctacatcagtctgtattttcatactataagtatattattctgatggaaattattttgaattgggaagaaaagttaatttgttcaggaagctgggaagccaagaattctatagccaaccatggctaaagcagcatgccaatgggacctttgcctaccattctgcttgacatttttaaagactctgtggcccttggagttagctgtgggggactctactgtccctggagcataacgatccccaacctggtttcagctgctgcctcattccttggcgttcgatggcttgtcgccgcttcattccagcctctgcctcggtcatcacatggagttctcccttgatgtctgtgtcttcacatggccgtcttccctctgtgtgtctcgcctcttcttcttttatatatatatatatatttttttttaattatactttaagttctagggtacatgtgcacaacgtgcaggtttgttacatatgtatacatgtgccatgttggtgtgctgcacccattaactcgtcgtttacattaggtatatctcctaatgctatccctcccccctccccccaccccacaacaggccctggtgtgtgatgttccccttcctgtgtccaagtgttctcattgttcaattcccacctatgagtgagaacatgcggtgtttggttttttgtccttgcaatagtttgctgagttagaatggcgatcattaaaaagtcaggaaacaacaggtgctggagaggatgtggagaaataggaacacttttacactgttggtgggactgtaaactagttcaaccattgtggaagacagtgtggcaattcctcagggacctagaactagaaataccatttgacccagccatcccattactgggtatgtacccaaaggaatataaatcatgctgctataaagacacatgcacacgtatgtttattgtggcactactcacaatagcaaatacttggaaccaacccaaatgtccaacaatgatagactggattaagaaaatgtggcacatatacaccatgaaatactatgcagccataaaaaatgatgagttcatgtcctttgttgcctcttcttcttataaggacacaagttgatatgttttggatgttatttcctccaaatctcatgttgaaatttgattcccggtgttggaggtgtggcctggtgagaggtgattggatcatgggggtggatccctcatgaagggcttagtgccatccccttggtgatgagtgagttcttgctctgagttcacatgaaatctggttgtttaaaatcatgtggtatttcctcccatgtctggaacccactcttgccaagtgacacgcctgttcttctttgccttctgccatgattataagcttcctgaagcctgtgccagaagcagatgatggagccatgctggtacagcctgcagaaccatgagccaattacaccttttttctttataaattacccagtcttggatattctattatagcaatacaatgaacagactaacataacagtcatattggattaagggcccaccctactataatatgacctcaatttaattacatctgcagttaccctatttccaaataggcccacattcacaggtaccaggatttcagtgtaagaatctgggggatacccaattcgatccactgcacatgctctccctgccttagctttggaagaagcaaactcccttccatcttccctctagctcttgctcccaggtttaaagggctgtcttcgaatcttcccaaaccccagttggccagcatcctttggcctgcccacagccccttcctgagctaaccttgcctctagcccggtacaccgcaccctgcttatgccagctgagccaaacagaggcttccctgtatctgtcagggttcctccagctctcttttcctctagctctggaggcctcaaggcttttccgaactctaaccccattgtgcataatacatgtcttagcagataatgaaatcgttgctcttccacttggctgttgggaggcactatgctccctttctcctgtgttcacttaaaaccccatggcatgactcagtaagatatggcagctttggagtcagcagcacataaggtcctgtcccagctcgctgttagtttgctagatgaccttgggcaaataacttcatctttctcagcctcaattcccttatctttgcaaatgaggcaatagcaacacctgctctgcaaaattgttgttaggattgagtgacataatgtgcatatgttgcctcatagtacgttcttgtgaaatgtcattactgctctcatttcatctcactggcctgtaatgtagctagtaatagtcactgtctctttttattgagcatttccttttgtgccaggcactttgtgcttggtgatttacggatattatttctaattcttataaatttcctgcaatgtaggtattactatttctgttgacagatgatggaaaccaaagctcagaaagaaatgaaagtaaaatgaatgaaaatgaaaataagatgagaaagtaaaatgcccaaggtcatggccactaagtgtttgagccaggatgtgaacccaggaaagtgcacctttgcactcttgcacctttgcactagaggcagtgcaaagctgcctctctagagtctctcattaatccactgattttcttatgtcttcttagcctgtcctttctcacattctcaccctcacactttctcctattctgttctcctagctgacttttccctttcttcctctcttttcactgtccatgtcttctaagccagtgtttcttaaatttgttcagatgtcagaaaagcatggtgcctttcacagaatagcatgcattttttgttttatgttttttgcagaacactaagaaatactgataaaattctatcatgtaaactttagaattacctttgctagtggaaactgtggctgtttattttctatggataatataaacttattatagaactaactataatatagaacccataagtgcatacacacatacactgaagcatagctaggaacaaagcatgaccaattgcttcctcctcttcttaactcactactcaattatgtatttcctcatctattaggacttgctaatagacaagaatgagaaggcactaaggattttcctaaaaatttatgggaggaagactggaggctcagaaaattgtatacatgaatgtatgtgtgtctgtgtggcactttggtccagtatgtggatacactagcaacatttaacttcagtgtcatctctgataatagacgggtttgctgattgcagagagggtcagaaatgatccactctaaatgctcccttacctgtgggcttcctgggttacatggtgggacacacgctccattttaatcttgtgcccctgatttccttcccttacaaaaaattcagatgccccaattacctttaggagtcctgactgtagggggatcatgtattggaaaatgttcacagacgtcaaaacactctgacgccacagatgtcttgtgatttattttcaccttgtggtggtgaagactgacctcagtgtagccactgtggctcctatcaatgcaaagaaagcaagcaacctcatcagaacacagaaacacgtgtcagcttttgatttcagcaccagccattccccgctgctgtcagaggaaatcacgggtttgcacctgctccctcacctgtgtgctcctctgtggcttccttgtggcttcgaaactaggcacacttcagatttcttatgtgaagccatttttttttttcagtgaagtttcacagttgtcatcacatgcattttgtattccttcagggacatcctaacgtagtgactcagagatggaaagcaggtgagagcccctccctcagcgctgctgggtactattgatcttaaatttgatctgtcagcacatctctgagtaggtaaacaccatgctccatcctgctcacaaacaagcaaagccccagcctcatcatcattggcttccttcagtagacacatgtgttggccttctgtgttgttacaacaaaacacaagtggaaaatgtaatgtgctgtataatgtttattgattttccctgagctaaaagcaaagtttcagacgtagtcatggagatggccaggactttggtacagagggttccgtgcaacttcctggaatcattacccaaatttagatcagactggggatggctggtgcaatggcagttttgatgattagaattcagcagaactcctgcaggcagaggttgggtggttctgtacaatatgggagcagagtccctgtcttcctgttccctctcagagccacatagacaacatgctgggctgtcttgatgcgatgcctttgcactcagtatacaggctcactggctttcctgccacttctccacgctcctcaaggccaacttgagacttgagaccgtagcattaagagtcagctttactactgagctcagctacagagtttcctcatgatctggaacagcacttcacttcccaaactgcactgtgcatgtgaatcacctgggaatcttgctgaaataaagtttctgattgagtaggtgttgctagagagtaccaatttctaataagcacttagttgatcccaaaatggacagtccatggactgcaattcatatagcaagagtccggtgaaaggtgaagacccagaccagataccatgacaatttaatttgcatactggctccactgaatgttgtaaaccatccatccttagcacgtaggggatggagggggtctcctgaccattgcaactgtggggacggtgcttctcaactttgtctacccgttagaatcaccccagggctttaagacccatccaagcccaggaccccctccagaccaattaggcaaagctccccaggtgattctgtgcagccagggttgaggaaccagtggcttaactcattattacactcttcaaatgcagcactaacatggcagaaagaggtgtgacagtaataatagcaacaaacatctggagcatgcatgttctgctgtttcacaaagcagattcacatctgttatttcttccttataccaactgtatatggtagaccgctgctgtaagaaggttaccaaaaagggatgatggctcaaacaaaatagaagtttattttcacctagtggcattgagtgaatattgatccgccagtgcctcttctccacccagtcattcaggggccagtggaagctctgctggcttcagggtgggcttctgaggtcccctaggagatcatttccattctaggcagccagagaagcatgggaaggcttcatggatcaagcgtgaaagtagtagttatcatttctcttcatattccattggctagaacttagagaaacaagggacagtgggcaatgtggaccagctgggtgctcgtggaacatgggttatggtgagcaaccagcagcctctcccacgagctgtgtggggtagatgtgaatgcacagactaaaggagcaagtctttcctacatgaagaacacccggggggctgtatggacctttggaactagtaagaatgaaaatactcagtcaaagcacctgggctcagtggctcagaaggatttagtaggttaaaatattctataatactacattagtattcattcattgtacattctaaatattcatttagtaagttaaaatattctacattcttctgcttcccctgccccatgccctggagttatttgtatggatagttgcaaggcacacactggttttaagcctcattttattattttgcatgtaatgaaacatataaattggttaaggactgtgataagtgatacatagttctcatctcagcccccctcccacctctgagtggtggccttgcctcacacttcattcggaaaaggggagccttcagagggcagcttactcacatctccaccaccctggccaccgatctgctgaggcctgtgtccagcactcatgcttccctccagcccctcctacacctgtcagaggccagcccctccttccactcatgtggaagatcacatctttctcctcctgaatgactgccctcctgcctggattaccaaccttgtaccctgtgttgaaccactcctgccaacgtcttaacaagatcaagagctctggggtgggggcggggctctccctggaccctccggcctctgctttactgcttccctgcagcaaacttctctaaagagtcacctgaggtttccatccccttttactccccaactcactgcagaatggcttcccctctgccactgtatcaaagctgcttttcttagggtctctactgactcccatttggccaaatccaatggccactcttctttttccatccttctcagcttgtgaggagctgctccctcttccttgggacagtctcccctcgcggcttccatgatgcgccctagtctcctctgccatctttttcgtccctgtagggtgtctcagcatttggactgggtcccattcccttttctgtctgccctctccccttatgtgagtgcgtgcagtcccgtggctgtaaagattatttctatgctcatgattcctgagttctgcatttatcccagactctttctctggctgcctaactgacctggatgactttcccactggaagctcaaacccgaccagtgcaaaaccaagctctgtaccactcccttgccatgaaacaaataaacccaacaaaaacctagcatagtcagtagtaccacaatcgagccaggtcagaaatctgggagttatccttctttttctcctagccgcctaatcaccaagccctattgtagaaacagaggaataacattcaagtcactcttcttcccaccacattggctgccactgtcctggtccaggccgccatcatctctccaggcatggtagccacttcctggcagtcctgccatgtctatccctgctctctaacagcctgttctccacccagctagcttttaagaaatatgccagttcccactctttgcagtgtcccttcacactatgataaaatcccaactacttgccgtggttccatgcagctgcacacacagtgtcccgcctgcctcccatccctcgtgctgtgtagccctctgtctcctgcacactcagccaccatcggcctctcttcactgcctccagcccaccttcacatgtgccatcctctctgccaggcacatcctcctccagcacttcctggaccgagtccttcctagtttttatgcatcgtgcattcctgtatgcatttatgatcggattagggcctctcatctctctgtagtgaagggaccagtgatttggttactgttttctaatacgttgcagaccaataatacacaataaaaacagatactagataaaataaaaagacaaacacataatacaagtcccatttttaactatcagattcaactgtagtcaaattgcattatttaaatgcaatttagatattgaaaatatctatcaaaatagaaattgaaaacacatggatgttgtgacaaggtcagattgatctctctatttatttgtcatggatttgtagccaacagttggtgcaccagtagggtgcaccagtggtctatggaccccactgtgaatagggctgttctagatttcagtttaaaagtcatctatttagggggctttcctggacagctcatctaaagcagattcttgcacacacacccagtgctgttagtctctcttctgtacctcctattggtctccagtgtggcacagagaatttgtgattagatgtaacgtgagcagtttcttatcttgaaatcagtctgttgcttagctgatgagtaatttcttccacctctctgaccacccatattccctgctgaaggtactttgggcacctgcctatgattgcggggacagagcagctccctaccaccctgtatcagaaaacaacacctgagcctacaccaagactcaagcagattttagtcaccagttctcagtggtagaatccaatctgtagcatcagggtggggttggagactcagcagggtccctgcattatctacactgagggaccaagaccatgagacatccccacgtgacctgccctctcttgatagagactgttccatccacagactctccttcttcctgtttattttgtcttttccattgctccccagctgcactggccccttgaagtctcacctctcacctttcctagacccgggcccttttcctggcctcctcttgtgtctggagactcctcagtttctcccacatagggtgcacatggcagctgttctctctggcccatctccattgcagaggaagcaaggtgggctggcctttagttttttaaaccttctgactcctggttgtctaatcccctgctagtaccagcatatgctttggatcttactgtgcataaaagaacatctacctccttttggtccaggtgccttccaaaccccggtgggagatgtggtgcccgagagctccatcccaactcctgtgtgtgtgagattgtgctattaatgtttttctcagcagctagaggagaaggcctatccagccacataaatatctatgcgtttacttatttatcatctgaggatgggaccaaggtagtatcagtggttgtccaaaaaatatttgttaaataagtgaattttaaaatgagtgaaagaacataattactatacttaggtaacagaataaagaggctcttatttcagaaagtccaaaatgcaaattgtccaaacataatagtctcccttatctatgctggaggaggtgccatagtgctgataacgcaaagcaggaagagacgatggaggaattctttctttctttccacttagtgcatcaggcttgctttctagcttcattgtgctttgggcaataggattagttgcccttccctgagctcagacagtgccgatgggggcctggatgtacctaaagacaggcgggaagtggtttgagatttatttgcctgtaagcaaatgaaaatgctccagccacatgctggtagtggagacagcatgggcttctgcggctgacacccccaaatcacaaggtggcctttgctgcctggccctgggggccctctgagccacccaccctcagtgctgtgaacagcattcaccaaaaggggcagggagtcacctgcagaaaaaaatcagagctggacagatggaagggtgacttcagtgggagaaggtggctctgagtcccctgccagtgcgcagggaggctgggtgactgtgtccccaggaagccccatctctccaaaggatggtgtagttcatctcccagaagaagacagccagggtcatccagggcaaggcgggcagcccagccctgcttccttaaacccgtggggcagatgtgcatcgcaggcctccctggagcgaggcagcttctgtctccctgagaaggtcctgtggtgtctccatgtgggaatggccacagagctggctgatgtgctccagggaggagcctggagcctggagccacagggctccctgtggccactgtcacccggctgtccatcatggggagcatctggccagggggacacttttccagctcacacgcttaattggaccacaccatgggatgaggagaggatctgccttcagtcgcatctctaatgagacagagaagcagcagggtagacacttttgcctaacctacaagtgggacgtgaggaatttggggactcagacaactggcagatgctttcttttccccacactctccagcgacttcaccctgtggcagggccagagtcatggatccccatcccagaaaacaaaccaatattggtacctgatgtgagcctcccttagcaagccactggcccaggcccttagctcatacagccctcacaacagctctagtgagcgggtattattttcttcatcggacagatggggaaactgagtgaggggagtaactaacatgcctgtggttattcagccaacgagtagcagagctgggcttcaaaccctgactcatctgcctcccagtcactatcaggcatcctgccacgtggacagggatgggcctgggccagggatgaaagtgagggacaagtagaaattccaaggggtgattccagggacattgggagcatggcaagggtggggcagtggaggagttggggttgttccaatggcttggagatgctgctcttatttcttggacaggcagaggtgttgttaaacccccacagcatgccagacaccagactgtcccactcaagaaatgagtgcctggcccaaatgccacaacactggagaggctctgcaggcaaaaacccttatgcttactttttctgggttcattgagatgctgcataatattaagaaagaagtctaattttggctgggttcagtggttcatgcctgtaatcccagcactttgggaggccaaggtgggtggatctcttgagcctaggagttcaagaccagcctgagcatcatggtgaaaccctgtctctacaaaaaaatacaaaaattagctgggcataatgatgtgtgcttgtaatcccagctacttgggaggctgaggtcagaggatcacttgagcccaggaggttgaggctgcagtgagccatgatcatgccagtgcattccagcctgggtgacagagcaagaccctgtctcatacatacatacatactctaattattactagcttcccaggccaccgtaaaggggaggtggtaggattgtcttccccaagaagactaaggaacaaatttccaggactctgaaaggcactcctttctttgatagtggatggcagtcacttctcgattgctgctcagacacagagcagccaggcaagcacttagctcctaagtcagagattggctgaggccccgtccggagaggactgcttgtccacaaccatcgctggtctaaaaacttcagtaaccccttgaaaagcctttggggggactttcagtttctggttctgcgtgtaaggagttcggaagtcaccaatctgtcctaacaatgagtaaaaaactgaacagactgaaaaatcaagaactcttcacggatccataagagaagtaaggtcacagggcaaactgctgctctcaatatagagagacagaaaagtaaagagagtcacggcttacctgagtggagatacacaggtggaaaccaccaagggaaacaagacaggggttggggaaggtgtaagagaacctgactgtaattgatgaattgctgcagcctcagtgtggccaactgtagaggtaaaagctctaggggcacccagtcatggggggcctccatacttttgtgagttttgcctccagaagctctaccaggttctcacaggaaacatttttctcacataaaaatccccttgtgcttctggcagggggaggagaatgagccattttgaattatgctggagcagtccgtccttaacatggtctgtcccccagggaaacttgctaaccacagccaaaactgctggggtattatcagagcccaactgactcggaggaagggaagcacccaactcctgccccctctagccatcctgtaccacctaagagagtgaagggaaacaaaacaaagctgagaagcacttgtgaagctcacagtgcagaggctcaggctcactaaaagactgagacccactcttagggctacagagtgcttctccttcccctgcgtggcaccaccacattaccaaaagcctccttacagcagttccctttacctggtacaccttgtccagttatcaagaagaaactacaagagatattaaaaggcaaaaaacacaaatttgaagatacagagaaagcatcagaagcagacatgacaggaatgttggggttcacaaacggtggatttaaaacaactatgattaatatgctaagggctctaatggaggaaatattcagcatgcacaaaaaaatgggcaatgtaagcagaaagatggaaatcctaagaaagagccaaaaagaaatgctagatatcaaaaacactgtgatggaaacaaagaatgcctttgatgggcttattagtagactggacatggctgagtaaagaatctctgagcttgaggaaatgttagtagaatcctcccaaactgaaaagcaaacagaacaaagactgaaaaaaaaacccagaatatccaaggactgtgggacaactacaaaaggtgaaacatatgtgtaatggagataccagaaagagagaaagaaaagaaagaaataggtgaaaaaataatgactgagaatttcctcaaattgatgtcagacaccaaaccacagatccaggaagctcggaaaaccagacaggatacatgcaaaacaaacagaaaacaaaaaaactaaaacaactgcaaccagaaatatcattttcaaattacagaaaaatcaaaaataaaaaaattctgaaagaagccaaggaaaaacaccttacttacagaggaacaaagataagaattatatctgacttcttctcagaaaccatgcaagcaagaaaagagaggaatgaaacatttaaagtgttgagagaaaaaaacccaaccaacctagaattctgtaccccacaaaaattaacgttcagaagcgaaggagaaaggaagattttcttgggcaaacaaaaatgtggaaagtttgttgccagtaggccttgcaagaaatgttaaaagaagttctttagagataaagaaagtaatataggtcagaaagttgggtctacataaagaaaggaagaacactgaagaaggaatgagtgaaggtaaaattaaaacttttatttttcttattcttgattgatctagtggataacagtttattcaaaataataatatcaatagtaatgtacttgatcacatatacttaggtatattacacacacacacacacacagacgcttatatataagtgagatgaatgacagcaatggtacaagggatgaaaaagaggaaaaattagtatcattttgtaattataaggtactcatactacctgtgaagtggcattgtgatatttgaaagtggacttggattcattgtaaatgttaattgcaaactctaaggcaaccactaaaataagttaaaaaagaaatatagctgatatgctaagacaggagagaaaatgtaatcagataaaatgctcaattaaaaccaaaaagaaatgctggaagtggatgaaaaagtggaagataacaatagcaacaaagaacaaaggcaccaaacaaaaaacgataacacatatggtagataactcaactatatcaataaccactttgaatgtcagtggtctaaatgcaccgattaaaagacagagatggtcagagtagatttttaaaaatgattcaactatctgttttttacaagaaacccatttgaaatgtgaagacaaattaatataaataaaagaaagtatatggaaaaaaatgtaccctgctaacagtaatgaaaagaaaggaagagtaacaactgtgtatttattccagacagaacagactttatagcaaggaaagttatcaatgataaagaagagcattacatagaaacaaaggggtcaattccccaagaatacctaacagtccttaatgtgtatgcatttaacagaacatcaaactacatgaggcaaaacctgatagaactgcagggagaaatagataaatccactattatagatagagattaacacacctttattggaaatggacatatccagcaggcagaaaatcagtgaggacataactgatttcaacaccatcaatcatcaaacaataattgacatacatagactacttcatttaacaacagcagaaaacacattcttctaagtccatatggaacactcaccaaaatagtccactccacattctgagcataaaacacaccttaacaaatttaaaagaatggaaataatacagtgtctgcttgtagatcacagtataattaaacagaaatcaacaccagaaagataataggaaaatctcaaaatgcagacaatgtacttctaaataacatgagtcaaagaagaaatctctggaaaaattttaaaaatatttttaactaaatgaaatgaaaacacaacttgtcaacatttgtggggtgcagtgaaagcagtgcctagatgaaaatttctagcattgagtgcatctgttagaaaagaagaaagatctaaaatcaataatctaacttttcaccttaggaaactagtaaaagaagagcaaattagatacaaagtaagcagaagaaaagaaataagaattagagcaggaatcaatgaagttgaaaataggaactcaatagagacaatcaacaaagtcaaaagctgattatttgaaaagattaataaaatcaataaacctctaaccaggctaactaagcaaaaagagaaagaacataaattgctaatatcagaaatgaaagagtggacatcactacagatcccatggacattaggaggataataaaggaatgctctgaacaactgtatgctcacatatttgataacctagatgaaatggagcaagtccttgaaagacacaatctgccaaaactcacacaagaagaaatagaccatctgaataggcctatatctattttaaaatttgaatcaataattaataacttttccaaacagaaagcactaggcccagatgtatttgctggtgaattctaccaaacatataaggaagacattataccaattatctataatctcttttggaggatagaagcagaaggaatacttcctgactcattttgtgaggccagcattactctaataccaaaaccagacaaagacattgcaagaaaagaaaatcgcagatcaatatctttcatgaacatagatgcaaaaatcctcaacagaatactagcaaatccaatccaataaagtgttaaaaaattatacaccatgaccaagtggaatttatcccagatatgccaggctggttcagcatttaaaaatcaattaatgcaattcatcacaacaactgactaaaaaagaaaaatcatttcaatatatgcagaaaaggcatttgacaaaatcccacaccaatttatgatttaaaaaaaaactcccagtaaactagaaataaagggcaacatcctcaaccgtataaagaatatctacaaaaaagctatagctaacatcacgcttaatgaagagaaactagaagttttcccgtaagatcagggacaaggcaaggatgttctttctcatcactccgtttcagcatcatactggaagttctagttaatgcaataaggcaagaaaaggaaataaaagatatatagattggaaagaaagaaataaaactatctttttcacaggggacatgatcatctatgtaagaaatccaaaataattgaccaaaaaaccctcctagaactaataagcaattatagcaaggttgcaggatacaaggttagtatacaaagatcaatcacattcctatatactagcaatgaacaagtggaatttgaagttaaaaacacaataccatttacattagctgcccctaaaatggaatgcttagacacaaatctaacaaaatatgtacaagatctatatgaggaaatctacaaaactcttatgaaagaaatcaaagaactaaataaatggagagatagtccatattcatggataggaagactcaatattgtccagatgttcgttcttcccaacttgctctatagattcaatgtagtcttaatcaaaattccagcaagttattttttgatattattaaactaattctaaagtttatatggggaagcaaaaaactgagaatagccaacacaatattgaaggagaacaaagtgggaggactgacattgcctgacctcaagacttatcataatgctacagtaatcaagacagcatggtattagtgaaataattgacaaatagatcaatggaacacaatagagagcctagaaatagacttacgtaaatatagtcaactgatatttggcacaggatcaaaggcaatataatggaacaaagacagacttttcaacaaataatgctggaactattgggcatccacatacaaaaacaaaaaaaaaaaaagctagacacagaccttacactcttccataaaattaactcaaaatagatcgtatacctaaatgtaaaatgcaaaactgtgaaactcttagagtataacatggaagaaaatccagatgacctgtgtatggcgatgtctttttagatacaccagtggcatgatgcatgaaggaaataattgataagttggacttcattaaaattaacaacttctgttctgcaaaagacaatgttaacagaatgagaagacaagccacacacttgtagaaaatatttgcaaaaggcacatctgataaaggactgttatccaaaatattcaaagaactattaaaagtctacaacaagaacacaaacaacctgattttaaaatgttccaaagaccttaacaccatcaaagatatacagatggcaaacaagcatatgaaaagatgcttcaagtcatatgtcatcaggaaatgcaaattaaaacaagagagatcactacttacctattaaaatgaccaaaatctggaacacttacaaaccgaaatgctgaagaggatgtggagcaacaggaactctcatttgttgctggcaggaatgcaaagggatataaccactttggaagacagtttgatggcttcttacaaaactaaatgtactcttacatgatccagcaatccttctccttggtatttacccaaagaaactgaaaacttatgtccacaccaaaacctgcacacaaatgttatagcagatttattcataattgccaaaacttagaagcaaccaagatgtccttcagtaggtgaatggataaataaactatggtacatccagacaatggaatattatttaacactaaaaataaattaaccttcaaaccatgaaaagatatgaagaaacttcaaatgcatattactaaatgaaagataccaatctcaaagggctatatactgtcctattccaactatatgacattttggaaaaggcaaaactatgacgacagcaaaacgatcagtgattgttgggggtttgggggtgggtggggcaatgaacaggcagagcacagaggatttgggggggcaatgaaactaccctgcatgataacttgaatggtggatacatgtcactacacatttatccaaacccatagaatgtacaacaccaagagtgaaccctaatgtaaactcgactctgagtgataatgatgtatcaatgtaggttcatcagcagtaacaaatgcaccactctggtggggatgtgaataatgggggaggctgtgcatgcgtgggagcagggagtatacgggaacttcctgtaccttctgctcaatattgctgtgaacctaaaactgctcttaaaaataaagtctttatttttttagaaagaaaagggctttaggttttttttttcaatcaagagaaatagtcttcttatgttttcatatttacacttctttttttcaggaggaagacctgaacatcttttccctgtcctttatttcccacacatcaggttggcagctgctgtgctttatttttgccctgtgttaaagtcctctcccaccccagcacctacctgttcctcaactagcaccaccacatctctgttctaaatgttgttctcctgcaataaaggacgtttgaattaaacattccatttttatcctatactgtatttcaccatgatctgcacacctgttagtgcatcaagggaagaaccaactggcattgttttgaaggtgttagaaacgttggcctctttattttagtgtgtatctcagaggtgggactggcaaagctctatttcacgtcactaagacatccctaaaatggacacaaatcctggtgtgtggtgtccgtcgggtgaagccatgaggctatgataaaactattatcatgtctcaccttttttcccccactgaaaaatgagaccagacacagcatgaatattgcagctcattgccaacaggagagaagtggacagggaaccacctctggtttattgtgaaaactttgacatttccattcactcaaatagcaaatgtttatcaagaatcatgctggatgctacaggagttagaaaaactctagagacacggcccctgctctcaaagagtttatgaatctgtacaagtattaggcatgtaaaatgcacaaagtgcccaggaactccaagatcactgcctgtgcactcagggaaggcttcccaaagaggctggtgtttgtgttggaattaaatctgcataggaggaaatagccagagggagggtgaggaaaagacactaaattgaaaggaggctggaaaatgagggaaggcttatttggggaaattgcagtcttatagcagccccatccagcccagctcaggccattcttggccaacacagggaagacttcaggtcccatgcctcagcaccctatcctttggtcccgcctccccacatgtagcccacctctgggaagttccacaagagactaagtatggtaaaaactggactctgctgccttttgggtaggtaggaattttccagctagtctgaaaagagccgtaaccctctgtcatgaaacaaggaacagagacttcacacctcggggacaggaatcatccgtttctggctgagtgtcagcagagcctttcttggattctgcctataaccactgaatgtccagactccaagcctcacaaaagccctgttgctaataatgtctaaagtaagaaacattaagaaaaatggagttgcagaaggatctttgttcatgccacccacaggttttccctgggtgtgtttcccttagaactagcaactgacgggatatgagtcacaggctgagcctaaaggagttctaagataagaacagaaaaaagtgccatagcccggtccacttttactcaccggaatttctaggaacacacaggttatttcaaacgccaaccatgtggccgttgttcatggggctgtttgccatgtgtctgaggcctctgggtgtgggagtgtgtccatccgtctgtctgtctgt

SEQ ID NO: 360 - DNA, 2736 bp, Homo sapiens
gcgaccgctccccggcgggagccagcgaaggtttccatgtcagaggccgatggagaactgaagattgccacctacgcacaaaggccattgagacacttcgtgtagctggaagacaccaacttcctgacaggagctttatttcatttgggatttcaagtttacagatggtatcttctcaaaagttggaaaaacctatagagatgggcagtagcgaaccccttcccatcgcagatggtgacaggaggaggaagaagaagcggaggggccgggccactgactccttgccaggaaagtttgaagatatgtacaagctgacctctgaattgcttggagagggagcctatgccaaagttcaaggtgccgtgagcctacagaatggcaaagagtatgccgtcaaaatcatcgagaaacaagcagggcacagtcggagtagggtgtttcgagaggtggagacgctgtatcagtgtcagggaaacaagaacattttggagctgattgagttctttgaagatgacacaaggttttacttggtctttgagaaattgcaaggaggttccatcttagcccacatccagaagcaaaagcacttcaatgagcgagaagccagccgagtggtgcgggacgttgctgctgcccttgacttcctgcataccaaagacaaagtctctctctgtcacctaggctggagtgctatggcgccatcagggctcactgcagccccaacctccctgggctccagtgatcctcccacctcagcctcccaagtagctgggactacaggcattgctcatcgtgatctgaaaccagaaaatatattgtgtgaatctccagaaaaggtgtctccagtgaaaatctgtgactttgacttgggcagtgggatgaaactgaacaactcctgtacccccataaccacaccagagctgaccaccccatgtggctctgcagaatacatggcccctgaggtagtggaggtcttcacggaccaggccacattctacgacaagcgctgtgacctgtggagcctgggcgtggtcctctacatcatgctgagtggctacccacccttcgtgggtcactgcggggccgactgtggctgggaccggggcgaggtctgcagggtgtgccagaacaagctgtttgaaagcatccaggaaggcaagtatgagtttcctgacaaggactgggcacacatctccagtgaagccaaagacctcatctccaagctcctggtgcgagatgcaaagcagagacttagcgccgcccaagttctgcagcacccatgggtgcaggggcaagctccagaaaagggactccccacgccgcaagtcctccagaggaacagcagcacaatggacctgacgctcttcgcagctgaggccatcgcccttaaccgccagctatctcagcacgaagagaacgaactagcagaggagccagaggcactagctgatggcctctgctccatgaagctttcccctccctgcaagtcacgcctggcccggagacgggccctggcccaggcaggccgtggtgaagacaggagcccgcccacagcactctgaaatgctccagtcacaccttataggccctaggcctggccaggcattgtcccctggaaacctgtgtggctaaagtctgctgagcaggcagcagcctctgctctgtggctccattcaggctttttcatctacgaaggccctgaggttcccatcaacccccatttccctagggtcctggaggaaaaagctttttccaaaggggttgtctttgaaaaggaaagcaatcacttctcactttgcataattgcctgcagcaggaacatctcttcactgggctccacctgctcacccgcctgcagatctgggatccagcctgctctcaccgctgtagctgtggcggctggggctgcagcctgcagggagaagcaagaagcatcagttgacagaggctgccgacacgtgcctcttccctctcttctctgtcaccctcctctggcggtccttccaccttcctctgtcctccggatgtcctctttgcccgtcttctcccttggctgagcaaagccatcccctcaattcagggaagggcaaggagccttcctcattcaggaaatcaaatcagtcttccggtctgcagcacggaaaagcacataatctttctttgctgtgactgaaatgtatccctcgtttatcatcccctttgtttgtgattgctgctaaagtcagtagtatcgtttttttaaaaaaaaagtttggtgtttttaaccatgctgttccagcaaagatgataccttaaactcccactgcaagcccatgaacttcccagagagtggaacggcttgctcttctttctagaatgtccatgcacttgggttttaatcagcagttccctattattctgattttaagctgttcctgtgatgaacttagagacagcatcggtgtctgctgctgtgtccccaggtcttgtgtgggtggcacagatctgggcagttagatagtgctctgtgcctaaggtgaagccacactagggtgaagcctcacttccctgtttgagcaatgcagtgcctgctgcccgtgtgcatgaaggtacagccattcagataagtggaactattgagttacataaagaaaatagatttgcatttgtcaggcagacgtttatacaacaccacggtgcttttatacattgtgcttattttaataaaactgaaattctaaaaaaaaaaaaaaaaaa

SEQ ID NO: 361 - DNA, 31737 bp, Homo sapiens
gaattcaggctctgtggtaagaaatgctgtgtagtaataataacaacacagctacagcttccagcccctgagcacacacacaggcgtcagaccctgctgctttacagaatcccattgaatcttcggtgttccctgggttggatggcttcatccccattttacaggtgcctctgccagaagaaacggactgggcaccaaaggcagggcgtctagaagaatcccggtgtatgcaaaacaaaccagcaccgacaaaacactgaatcaaagcacttgcttgcctgggtttgatttttaaaagtgttagaacccattcaagatgaatatgggtttacagcgtcagtgcacagcttttgcggtgaatttacatttagaggacaagtgaaaaactcacccaccagctccacaccccccacacaagtcagtttcctgatgaccaatcaggaaactggaataccatcagtaaccccagtgctggggtttaccggctctcgcgcccctattagcagacgttgcttacagatgcaccacagcctctgagcagactcaagtagcgattctgtctccaaccctgcaaccaaatttctggctcctcatttgactttttttttttttgagccaggatctcgctctttcgctcaggcgggagagtagtggtacgatcactgctcactgcagccttgacctctcgggctcaaatgatcctcccacctcagcctcctacgtgtctaggacctcaggcacacaccaccacacccgcctaattttttttttgggggggtagagacagggactctctatgttgcccaggctggtcgccaactcctgggctcaagagatctcccgccttagcctcccaaagtgctgggattacaaggctgaggcaccgcagccagcctcatttgactatttgaatcagattaagacatcccttcttcaagactgcgcttccgcctgcgggagacttggttcagagtgtgcgattcagttaggagaaggaacgctcctgccacctgccggtattgctgcatatgaccatgcaggcttgcggccactgctgtcgccatgcctgaggtgcacgcgccatgtccctgaggctccaggtgccctgtgcattccctgcacgtagagttgccctcgaactggtgttgatctgatcagacttatttcagaactcgacaagaatgccatgagagtcataattgccccatattcattggcaaaatcctttggcttctgggctgcttgatcagaatgaatgtcagagatccaaagagcaagtgacaaaagtatgcatggaggttgaagaaaatctttgtgaattcaaagtccttccactatttttacttgaatttcaattgcttcatgtaatgtttgttttaggattcatcaccccacaattgaattccatagattgtacagcttagttttgaattaaaagatcgctgcgtgtcaccatcccaaattccctctcacacattgccccccaacacacaccctgcttattttatataatctcaaatgtctggtcttggaagtacaggaagctgagaaaatgatcctaaataacaatcgtgataattctcagcacattcctaattactggaggacagacatttcatgaccaactttctagccagctaaaatacaacccctagctttgtccttgggaccataagattttggggctgagagctatggactagtctatagactcctataagccacctgtgttactgcagctgcttccacctggtctggagcggggcagtccctctgtcggcttgattccccatcattccctgacccccagttgaagtcacatgtatgtgaccctcatgccacagtccccagggattggcaacatttttccttcaaaaatcagataaatatttggggctttgtggaccatacagtctctgtcacaactactcaactattacaactacacaacaactgcacaactgcacacagctgcacactactcggccgtctagcttaaaagcggatgtaaacaatggaagtaaattaatgggcgtggctgtgttccaataaaacttcatttgaaaagcaggcagcagtctggatttggtcttacacagtggccaggcccctcagctagtccgggcacttacaacactttcctctttctttgtccctgatacttatttccccagattgttctttacctttgctttatatgaagggtacttgtttatacgcctatctggaatcatccgttactataaatagatacacttctttctggcaaacaaaaatgaaaaaatgtcagtcaacagacaccgagcacttgcagtgagtccagcttggtggtggcaggggtgacccataagtgtttcagttctctagagctcctcagttcacttggagaaatggtagaaatgtatcaaatgctaatagttattcaaaagacaatggatggcgtaggtttaggcaattactaaatgggatgtacaagtaacacatgaagatttcagccaggcatggtggtgtgcacctgtagttccagctactcaggttgaggcaggagtttccctggagcccagatgttcaaggctgcagtgagccaggatcgcaccactgcactccagcctgggtgacagagtgagaccctgtctcgaaaacaaaaaaaaactacatgtaggttttaattatagcacttagtacagtgcataaaactacctagatacatcacaacttggttcaacaggcagtatgtaaagtgagtgttgtagaggctgctcactgaatcaggttcgaggttccaggttcattcacactctagccatttccatcctgctgtgaaccagacggggtgttcattatcaggtgtgcaataggtgaatacagtccctagactccaaaagtcatgctccatgggaattcatcggagctatgccacacttctctttatactttgcattgctgagagagacttaactttttttagatttaacattcctaaccacggtattcaataaataaatgttaagtgcctaaaatgtacacgtgttgttctaggagctgggtgtacagtagtgaaccaaaagacaaagtccacgccctgcacaaaataggaattacctccatgtagaggcgagccttcaagagctgaagtggcttgctctggtcataaaactagagggcagcaagctctgaaggcagattgctgggactccacacccctctaaccataactctgctgtgttcctcttgaccctgatgacaggtacccgcaagatggagtacaagggcagcagctggcatgagacctgcttcatctgccaccgctgccagcagccaattggaaccaagagtttcatccccaaagacaatcagaatttctgtgtgccctgctatgagaaacaacatgccatgcagtgcgttcagtgcaaaaaggtatctcagatgcccccttggcccttgcacgttctggctggtttgcctccatggtccatgtctgtcagttctctttccaaaaccaaggatacctgtgatacttaagtggcgtgggagctgtgcctgtcctgccttacattctgagcatttatccatcgggtctgggtgtccatccttctttcaaagacatcaacattgttgagctctgtgatcaaatcgtttaaccctgccttcttctagaccatttctaaatatgttcttatgttgataacctgaggttagagggaaggggagccaccatcccaaagctgtcttgttcagcttctctccatgaataaaacaagaaaacaactgcaaacttgagagggagagaaagatggaaggaagagggaggagaggaagggaggagagagagacggatgtgagaagaaaagtaaaggagaaaagtctgcctccatggatatgggacagatcatttattaaatgtatctactctggccgggcatggaggctcatgcctgtaatcccagcactgtgggaggccaaggctggtggatcacctgtgggaggccaaggctggtggattaccttaggtcaggagttcaagaccagcctgggcaacatgatgaaactccatctctactaaaaatacacaacttagctgggtgtggtggcacacgcctgtagtcccagctactcaggagactgaggcaggagaatcacttgaacccgggaggtggaggttgcagtgagccaagatcccaccactgcactccagcctgggcgactgagcgagactccatctcaaaaaattaaaaaaataaataaataaacttatctactcgataatgtgctattccagtcatggctctgttagggttaaagaaagaaagggaactgcatatctgtaggaagccatctctctgcccagttgccccccgacctgcacccttcagggtgtagcttagttttctgctgtgccctctgactcttagacacacgcaattcttattatgctatagcttccagcgtctctgtcctgttaggatttgcatcagcctgttgagtggcaccctcccactgctcactcgccctgggcagcgccagctgtggaactcatcacaggttctgttcgctctcctcctgttattgactctgctcacccagcttctgctgttttgcccttggggcctctacccttgcgtctgggccatggagaaacatccccaatgctgctacctgtacctggctggcctgggcaagaatatccccaccttgcccacaccttttctaagtgctgagtattcttaccaatttccattcagtctttctctcatttcctttttttttttctttttttgagacagaatctcacactgtcgcccaggctggagtgcagtggctcgatcttggctcactgcaacctccgcctcttgggttcgagcaatttctcctgcctcagcctcccaagtagctgagattacaggcgtgcgtcaccatgcccagccggttttttttgtatttttagtacagacggggtttcaacatgttggccaggctgatctcggaactcctgacctcaggtgatcgacctgcctccacctcccaaagtgctgggattacaggcgtgagccaccatgcctggccccatttgttctttactgttattttaaattttatttctctttatttcctctccttttatgcttctgtttttttctttttttgagacagtttcactctgccacctgggctgtagtacagtggcatgatctcaactcactgcaacctctgctttctgggttcaagtgattctcctgcctcagcctcctgagcagctgggattacaggcaggtgccaccaccaaacccacctaattttttttttttttttttgtagtagagacggtgtctcactttgttggccagactggtcacaaactcctgtttttttctttattcttagattgagctctcattcctgcttttattttaggaaccctcttccctgttctctcccctttttatttttattttggtttgttcttctcatcaagacctaacggaagttcatctgagttgctcttcctctgtcatctttccaatgtgtgctttattcatttgcagaaatgaaagcaacacatccttctgggatgcatgctttttgtgtgcatgttcattaaatacacaaaaacattcatgccagaagcatccattcctcgacatgaacttggccctctcaggcactggggatctgatgctggacaagatgcagacacttaactgtagtctaggtggaagtacactccagtgtcaaacccgtcagtagttactgagcagtgtgctatggaggagaagagcagagtgtggaatggagggacctcaactaatctgaggagttgggggccagggtggtgttgagggaaggagtctctgagaaagtcatgctatgctcagaggcattgagttagctgatgtgggtgggaagcatggaatccggagcaagggaggactgaggacacatgttgcaggcagagatgtcttacacacacaggctactgcattcacatggatacgttgcaaccaagcgtgtttggtgttcattctcttgtgcagtggggtgggttatactaagatgcttcatgatttatggtttaatgaaaagaatacaagatagaagggagtccagaattctagttcctgcttcgtcattaaccagctatgaattctttggcaagtcactttttaatttctctgagtctcagtttactcatccataaaattaagataatatctttcctacttcacaagctttatgtaaagaccaaaggagttactgcatgatactgaaatgttcaaaaaataaaaagcaaaaaagtgtgattgtgaggtgcttgcactccatcttccacagccttcgtttgccaagctgaggccacctacactcctctctgatagcttactcagctccaccaagcactcatttttaaatagaatgtgagatgcaacatttggagaaaaatatcaggtaaaattgaggtactgatggccagttccacctcatgtggctttgcagcttcacctcacagatgttctaagaccacaagacaggtgagaatgaaggcatccagcttatttttcccaaaacttccaagatgcccatctcttcttgtggcatcagcaggtgctagtcccggctgtcctttaagcctcttccttctttcaccgtaagtggctggagagacaggctcgtgagtggcattggagaggttaccacttgccagggtttttgttttgttttgttttgttttgtttttgagacagtctcactctgttgtccaggctggtgtgcagtggcatgatcttggctcactgcaacctctgtttccagggttcaagcgattctcctgccttagcctcctgagtagctgggaatacaggtgcaccaccacactcagctaattttttgtatttttagtagagatggggtttcgccatgttggccaggctggtctcgaactcctgacctcaagtgatccacctgcctcggcctcccaaagtcctgagattacaggtgtgagccaccagccctgccaggcttctaagtaaggactcctcatcaacttgcccaattaacctcatcaccctcacttcctggatgagaaaactgaagtgcagagatctttatcatgacctgctcccagccacagggctggtaaggagtagggttaggattcaaacccaggtctccttgatgctgtattgaatcccgacccctccactgtgctgcttccctgctcagaaaggtggcaacaccactgaggcaccctatgccttagatccccagcatccctgggaagggctgagggcaaccccaagctccagtttcactaacgggaaagccagggcctatgacactggaatgaaagcgtgtggtgagggtgacgagtgactgtgaagtttgtaaagcagcttcttggtgacttaacaaactggacgtttctggatgaggatcttgcatcgtccagtggcagtagctgagactgaagatgtctgccaagcacagaggccacactaactctccccctcgtccctgcagcccatcaccacgggaggggtcacttaccgggagcagccctggcacaaggagtgcttcgtgtgcaccgcctgcaggaagcagctgtctgggcagcgcttcacagctcgcgatgactttgcctactgcctgaactgcttctgtgacttgtatgccaagaagtgtgctgggtgcaccaaccccatcagcggtgagtgtcccggggttcccatttccaggggcgattggaagcttgaacaaggcctagcattttagcctgtgaccctgtctatatccctcaactccccagacctccctaaggctctgaacacagcagacttttctgcctatctgctttcctctccttggtgcactggctatgcttcagcaagtaatgattccttcctctgcagcccacctgatcacaaccatatggccagtgctccagtttagtttctgctttgggttggattatcgctaaaactgcagtctgtgagcctgtgacatcacaaaagcacaataaaaactggccttttcaggcttagcagctgtgctgtgttcttagaagtgtcccctagcatcttagtgggacggttgtactccaaaacatcttaatgggaaacttctaccacaaggccatagctatatgagggcagagggtacattctaaggagtttttcatattgtattcccccaaagaattcagctaagtgagagcccaaaatctggctggctggcagaccaggcttctggactagactattaagcaggctggagaaattcagtgtggagaacagaggagttcacactaaagtcctttaaatggtcaccacatatcgctacacaaatgagtgactgggtggggagagaaaagtgtgtgttctgtaataacacaggagaagttttatgatgtgggatttgcaatcccgttgcattcagttgactggttcgttcctatcagaggaaggtggcagacacttggagtacccggtggcctggctttcctgtgtggcttttcagtgtaactacagaaacacatctatacaccccctgtgtacttgtccttgactttcctttcccttaggcctagaaccaagttcacctaactcagctaactcaccttcccaggtcgctaaaacagtactctcatgtgtaatgcagagctcattacatttccatgtgaaattaaaatatgaagaaaagcacagtatttacactttacctatgttaaaatatctgtttctggtcatttatataccagatttcccttggaatcttttagggggaaaatgtaatcttttgccagaacatattcatctttaatgctgttttcagcagtaacttctgttgaggtaaatgtttataacattaagctttataaagtgatacaatctatataaaagcacttttaaatgtaaaacattagatatgaatgtgaattgtggttattgtggcactgagaaaaaacactaggtaaaaaccaactgtattataatcacggaccaatgtaccttaaatatttgattccattctatctgtctgcagctttctcaggatcttcccactgcgacaatatccctctcccctcattcccacccacatcgcactttatctgtgaggcctttcctggccatcccagggaggattaaccttttcctcttctacactcccttcactgcttcaatcattaagtcataaaaatttgagcaccaggcaacgtgaggcacctagtgaagacataagagaaatctgctccctcttctcatggagtttcattttgtgggaaaacacataacaaatacacagtcagcattctttgatcgcacttatcccatcgttttggaaccagtttatatatctcttctgatattcacgagatcctccaggctgtgcatagaatctgatttacatatggattcccaacacccagtcactagaaattcacattatccatattacacaatccaaactttgaaatggatcaaaccagaattccttcttcagtcccagttgcctgattctaactttcttcatccggtattattttctctctgttaacaggacttggtggcacaaaatacatctcctttgaggaacggcagtggcataacgactgctttaactgtaagaagtgctccctctcactggtggggcgtggcttcctcacagagagggacgacatcctgtgccccgactgtgggaaagacatctgaattcaacacagagaagttgctgcttgtgatctcacacacagatttttatgttttctttctcacccaggcaatcttgccttctggtttcttccagccacattgagactttcttctagtgcttttcagtgatactcacgtttgcttaaaccctttagtgctttgtgatagttcagtcccagggaaagagaaaactcgccctaggccctaggtgggaagatggtttgaaatttttgtaatcgagtaaggcacacccaaatgtaaaaatccttttgaatgatgcctttataaatctttctctcactgtctatttaagtgcaattaacatatgtcacgaacttgaaagttttctaaactcaataaggtaatgaccagttgttatttacagctctgtaacctcccgttgcgtcaagtctaaaccaagattatgtgacttgcaataaagttattcagaacagaatcttttgccaggcacagagtgtgaaatcatgattacaggtcgaggcactgagtctaagtaacactttattgcatggtcccatggtcactgtatgaagtgcagttccaatgttccaatggcctggggcattgccaactggaacagcatcacaccctttaaaggaagccttcggctgggcacggtggctcacgcctgtaatcccagcactttgggaggccaaggcgggtggatcatgaggtcaggagatcaagaccatcctggctaacatggtgaaaccccgtctctacgaaaaatacaaaaaattagccgggtgtggtggtgagcgcctgtagtcccagctactcgggaggctgaggcaggagaatggcatgaacccgggaggcagagcttgcagtgagctgagatggcaccactgaactccagcctggaagacaaagagactccgtctcaaaaaaaaaaagccttcagtcagcaccaggcacctcttccttgctaccttctctcccttttttttttttttttttgagacagagtctcgctctgtcgcccaggctaaagtgcaatggcacaatctcagctcactgcaacctccacttcccgcgttcaagcgattctcctgccctcagcctcctgagtagctgggattacaggcacccaccattatgcccggctaatttttgtatttttagtagagatggggtttcaccatgttaggctggtcttgaactcctgacctcaggtgatccacctgcctcggtcccccaaagtgctgggattataggcatgagccaccgcacccagctaccttctctgtctttcccatactctttctcttggaatgtaatcctctgcatttgacacagtaacataaactgacagtgaagccaattttcaggtcatttttcttggcagagcttatcggctctgtcccagtgttatggatccacatcttacaccgacttccataaagtgaaagattgcacaaggacataagcaacttgaggccagagacgacatcctgttcatctttatgttctcaacaccctcgcaactgagggcacactgggagccttcagtgtttctgaaaagggcagtaaagcaggagagacacacagtcattacagtaaaaataacattctgagctactagtgtggcagtagtctgtggaataatctcagatagcagtatacagttgggaagcacggagccaatgtatgggatagaacattgcacagttctctttagaatgggagcatcagtgacctttttgtccttagttttctaagacaatgcaatataataaaatgataggctgagcaacagaaaaatttggtggaaatcaagtctgatatatgctgagcatatgtgaaatcagtttcttaatctgagtgttagtcactgttagaatgtttgataatgtctggaatgagtcttttggttttatagttgacttgaggttttgcttaaaaagaataatttcatcctttgttagttgttttgctgttttctacttcataatataaaagtaaaagcactccaaatttcattttggaacatcttacttgttcctcattaaaaccatagactctcccaaccttaaattacccattctaaaattaatggttagggggaattccacttctagtaaatagctccaattggactaattctcctccaaattaacagtcattctggacaaaatatttatttaattgttaagaacactggagcacgatccaaagcaggcagatattggagggcagtagacacttggaagaagagaacgacactgggtgattttcctgtttcggccttttatccaatggcaggcccccgccagggatctaaaactctgttaggaaacctgcagtcttactggcctgaggaaccagaggccagagttcgggacaaacagcctctggaaagtgaggaagaaaatcctgaaaaggagagccccaagttcgtcgcatgaacttagaaatttctggctgacaactgaaccgtgtatacttaggccagactccaagcagcccagccaaggctaaaagcattgactgacaggactttacagatagtggtttgcagggcttagctgaccgaccctcttcctactgaaggaaattacttgtatataaaccacacaacacaaagtctctgaaaatttccccagaagcatacaacaaataaacattcattcaggaaaatccactactaagtcttagaaagaacagtgagtctgtggcatttgagccacagcctcatcctatcccatccccactccccagcttcatgtgacaaactctattctggaccaatgcagccaaaaattaaggggtctctcttcctccagctaccagtctagggctttgccccaggtgcgacaggctgagaatcgtagagctccaattgcccctaccctagcctgcttagtgcggaggctccacattgggaggggcaatctgagaagaccagcggctatcaacccactcacagagaagggatgtcagtcctggagaagcaggctgctgtccagcccccagaggagatccaggctctgagactggtaacccagcagttatgcccaaggggactggtatttggtacggagaacgagaaatctttgcctaaggggattgtcaaaaacaataagacatcttaccagtgagccattaaggaaggggctggtaactccatgctattagtagcaaaaagcaaaatgacagaccagccagaagtttaacacagaaaaccagagaaagagatagccaagaagagccctcctggaatctggtttatccttgaggttcgggaagtatgtatggacagggctgtatccactcaggagcaatcagatgtgaaacaaacttgaaagcattctctaaggcatacacagatccatcagcaaagagcagaaatcttattagctcaaagtgcttaagcagaacctctgaccaaacactggctgaacacataaatgtgtttgttcaaagaactaaaggaaatcatatttaaaaaaggaaggtaaaggaacaattacagttgttcctccatatccatggattcctcatctgtggattcaaccaactgtggatcaaaagtatttaggaaaaaaaaaaaaaagttgacacagttccaaaaagcaaaacttggatcttccacatgctgagtactatgttgaatccatgcaaatgaagtgatgtgtaagcattgtattaggtattattataagtaatctagagatttatttaaagtatacagaatgatgtgaataggttatatgcaaattctatgccattttatatgagacttgagcatccatggagtttggtatttgtagggggtcctggaattaatcccccacagataccaagagatgactttactcaccaaacaaaccaataaagagataaaaattatttttaataaatcaaatggaattctgaagttgaaaagtatactaaatgaaatgaaaaattcactagaggggctcagtagtagatttgagttaggagaagaaaaccagtgaacttgaagacggaacaacagaaattatacaatctgaaaaacagaaaaaagagtgaagagaaattaaaagagcctcagagaaatgtgagaaaccattaagcataccaacatatgtgtaatggaaggactagaaggctaggagagagaaaaaaagaacaggagaaaatattttttcagagttcatgactagtcaggtgcagtggcatgcgcctgttgtcccagctactcaggaggctgaggtgagagaattgcttgagtctaggagtttgaggctgcagtgtgagaaaacagcacctgtgaacagccactgcactccagcctgtacaacatagtgagaccttcttaaaaaagaaaaagaaaaaaagagttaatggttgaaaaaggccccaaatttgatgaaaaatattaatctacatattcaagaagctcaataaactcaaagtaagataaatgcagagaccatacccagacacattacattcaaaatgctgaatgccaaagataatgagaaaactctggctagatgtaaaataatatagctatataattaagactttttattaaattgggaaattaaacatacatatacaaaagtacacaaagcaaatgtcaacaggcaaaactaaaccaatgagatgttggaatattctgtatcaggggttgtaaactatggtccctgggctaaattctgcccactgcctgttttctttcctattttatttttttgagacaggatctcgctctgtttcccaggctggagtgcagtggcatgatcacagctcactgtaaccttgaacttctgggctcaagtgatcttcccacctcagcctctcaagtagctagggctacaggcacgcaccaccatgcctggctgtgtgtgtgtgcctgtgtgttttgttgttgtcattttgagacagagttttgctctgtcgcccaggctgtagtgcagtggcatgatcctggctcactgtaacctccgcctcctaggttcaagtgattctcctgcctcagcctcctgagtagctgggattacaggcgcctgccaccacgcccagctcatttttgtatttctagtagagacagggtttcaccacgttggccaggctcgtcttgaactcctgacctcaggtgatccacccatctcgacctcccaaaagtgctgggattacaggtgtgagccacaacacctggctgatgtctatttttaaaattttttttgtagagatgaggtctcactatgttgcctaggctggtctcaaactcctgggctcaagcgattccccccatcttggcattccaaaacgctgggattaccagcatgagtcatcacacctggtctgttttcttaacaaaaaagttttattcaaacacagccatgtatgttcatttacgcattggtttgctggcaattttttactatctggacctttacagaaaaacctgccacctgtgctgtactgtgtatcttgatctgggtagtgatacacacacacacacacacacacacacacacacacacacacacacacaaaattttttctcctgagctatataacttagaacttttctaactttacagcattttattgtaactcagtaaaaattttaaaagtttaaaatatgttacactttgaacttgagtgcacttgagtacactctgagttactttaaagcttgtcttttttttcattaaacagcaagccaacttgtttgatctttacttgattattacaatatgtgaaacctttgggggtcagtctctactgcctgatgtttctgttgcagcccacactgggtccactgttttcttgtatgcaaggataactctgacttgtgttaatcactacctttaaaaagttatccggggtgtttcttgagacttagaataaggatgtcttcctgcagagacgattgtcattgtctttaccagacacatgggctaccaccagactagaactacttcccagtcatttccagagttactttcaccttcctggggatgtaaatcttagctacaagtctgtatgagagtcggcttgcctgcctccaccccactgtgtcccctttccctttcctattcttccttccttcttttccttctttttcttccctccctccatgcatgaaaaggaaagatgtatttctaattcacacttatatgtggtggtgttttttgaggtcatacctattaggttcccctcttggaacactcagagatttgacttctctctcccttacattacagtcacctaaactacagctgagtttcaacagagcatcaaacaagattgcctgcttctctgggttcttgctgtctcttagcctgtcagctcttctgtgcttttatgtttgaaaaacccatgttttttcccagcagaattgctccttccatttaacagcaagcatttttctctgtttagcaaatgaaaaacctaattataaatattgtattagttacctctactttgttacacattctacaatgttaagatttacgttgatcacatctatttcattggcttaaggtttaatttaaatgcacaactaccttgtagaataaattacatacttaaactttgtgataatatttaatatttaggatattataaaattcttttttaattttttttttttgagatggagttttgctgttgtcgcccaggctggagtgcaatggtgcgatcagggctcactgcaacctctgcctccagggttcagttgagtcttttgcttcagcctcccgaatagctgggattacaggcacctgctaccattcctggctgaccttttgtattttcaatagtgacggggtttcaccatgttggccaggctggtctcgaactcctgacctcaagttaccagcccacctcggcctcccacagtgctgggattacaggcgtgagccaccacacctggccagggtataataaaatgcttaatagaactagtctaccctcaaccggaacaatgaaaatttagtcactgaagtaagtcaaagaaacagtttcactgatgagggaatcattctacatgaaccataaacaaggcaagaaactcattaaatatatctgctgtggtgcaatgtgccctggaactacaatggttactactccctcaatattgcccttagtgaaagctttatctctggaaaaactttagagaaatgcctgcaaaagaactcagtggtgttaatagagcagaactttagaaactagcaaagaaaaccttgtgatcacaaaaatgaagcccgaggtatatgtattgaacattgttgacttgctacaactagacactatccaatttgtaagcagagggctgccctcaagtctttaagtcagcacaataaataaaccctaactcctttggacaagactttgtaaaactagttatattaaagcaaaataaaagttatattaacttgcatatcacttaatcatattactttagaaacttaaaatatatactcaattctcaatcatctttagtgatgcccattcagacttgagggtacctctcattttctgcctagttattaaatgatagattacagaggctcagggataaggataaggttaattctagaaataccaagaagtaagatctggaagagtcttaaggataagagtgaaatccatctgctttgcaaaggaggaagtggaagcccaggaagaataaagcttactcaagactgcaaagaggccaacacactagaaatcagaaatcttgactcctagcccaccgtcccctaaaacatgggcttttttcttacacagagatgaagatggggtaaaaactaaatacatgagtttttaaacactgagatggaaatgtccaggtgacatacatgccaaaatgtatgtagtgacctttcagtgaaaaagaaaaaaaaattgagactagaactccattataaaaataagagcagactgacttcatccctgacatctattagcatttatgcattttactcactacgttctgagggtgctatggtttgaatgtctcccccaaaagttcatgtgttgaaaacttaattgccataggaacagtattaagagatagggccttaaagaagagattaggccatgaggactctgtcctcatgaatggattaataccattatcacaagggcagttattatggaagtgatttcttgattaaaaaaaagaaagatgagttcagcccaagttcttctgtgctttgcatactcgctgctgcctttctgccttctgccatgggataaccctcaccaggtgccagtgccatgctcttggacctccagaactgtgagccaaataaactggtctttatcaattacctaatctgtggtattctgttatagggagagaaaatggactaagagaggatcttctacaagaaaaatccagttgtttgtttttgatgggtttctctaggcttcaaggaattaaaaaaatataactagtaaactacctagtgcacagaatactgcgactttaattgttaaatgttcttcagattccttctcaaatttttatctagattgaacaactgggattaagaagaagaaaagacccagctgggtgcggtggctcaagcctgtaatcccagcactttgggaggccgagacgggcagatcacaaggtcaggagatcgagaacatcctggctaacatggtgaaaccccgtctctactaaacgtacaaaaaattagccgggtgtggtggtgcgtgcctatagtcccagctacttgggaggctgaggcaggagaatcgcttgaacccaggaggcagaggttgcagtgggccgagatcctgccactgcactccagcctgggcaacagagcaagactccatctcaaaaaaaaaacgaaaaaaaaaaaaaaaaaaaaacccaaacaaacaaaagaagaaaaggcccttgcggacagggaccatgttttatttactccatttccttatttacagcctaagtacagacaccttaaaactgttgaatggatgtttgtctagggatttattttgttgttgttaatagagaaaagtctatttgacattctttttcattaaaacaaaactgtgaaactatcttaaatgatatgacttaagcaacattagaaatgagtggagtctgtaagattaaaggcaaaaggaatgaacataatcactctcatctagctggtaaagtcatttctcacatgggtagaggctaacaattctgcaacctctatacatgtgtactgcaattgaacaattaagtaaatggacggtggttggtaggagccatgtttctcactgttggagtgggaggttccagacatgcaagggaagtctggaatgatcaatatggtaatagattagagttagagacatagtatgaactcatgttttagttactatagatacagatggttacatatagaaatatctatagaaatgtacacctataggggttaatataggtacatatatttccttgctctgtcagttgaggaggcctaaaaacaatgacaccccagtagcaatcagcatacttagtacccagatctcagtttttaataaaaggagcaaaggctccttagagaaatggctcattctacggcttgagcaagaaatatacaaaatgacgctagagcatcctataataccagaaaggatgtgttcaaagaaaacacaatcatgggataagtcacagggaaacgggagcgaactgaaagagctttcaatggccaaagcagaaagaactggagttaaaaaacaaaacaaaacaaaaacacacattagactttaacccaaaatataaaataagtatccatgagtcatactgacataaatcattaaataaaattaatggtagagaatacttaagtctcctgtgcagaattccaaataatttaggtacttcaccagcaaagtaactctgcattccttaagtgagtttgttccaaagagcacagtatgtatgaaaaggggaaacagaaataacctttttttttgggggggggggggcgcggtgggcaaaaatgacatttagaagggaaaagcaataactatagtggaaaaaaatgacaaacactacgtcggccaaatgaggttaaggttaacctcaaaagtagtatcatgtttacagcatgtgtcctcaaaataatgtgatgaaaatggcaatttacctctgtagtcctccccgcaaaacacatagccccagtctagtcatgagaaaaacagaaaaatcccaattgaggaacattctccaggtatttacctgaccattactcttcaaaactgtcatcaaaaacaaggaaactctgagaaactgtcacatccaagagaagcctaacatgacatgacaactaaataacatggtaccctgggtaggatcctggaacagtaaaagggtattagggaaaaactcagaaaatcgaaaaaaattaagaactttagttaacaatgagtcatttcaacaaaggtaccatatgaatgtatgttagtagggaaacagtgtggggtatgttaaaaatctgtactactgtggcaatttctccagaaatctaactgtcctagtttattttttaaaagtttattttaaaaacttatatagcaaggcagaacagacaaaacagaaggcttcgaaagataggatggttttatatttatgaaaagcatttgtctttcaccataactggtaaagcattttacagtctcctaaatgtttgttagtcaaagaagtaagttttagtttaaactatttacctgaagattaaaaaagaaaacaacacttggctaattttacttgaggataaaagacagggctattacagacttactcaactagtctatttttgattaaactgaatgcttggttaagtctcaacagagttaacaaacagcttccaattggtattagaatcaaatccaaagtcctacattcatacatcatctggctcctgcctaccttctttgacttcattttatactaccactgcccgttttcattcactggagccacaccagtctttctgttctaagaacctagtaagccttagggctttcatgttttgtccttgtctgggacctgttaactactgctgggtagcaaactacccccgacacttagtggctttatacaactcccattttattcactcatgattctgagagtcatcaatttggactgatcccaccaggaagctcatcatacaactttagtcagccggcagctagaccgggggggataggtgactagtggtcacatctggcagttagtgctggctgttgggtgagccatgtatttccagtgggtatgcctgggctttttcacatggctgcaagcagaagtccaagtgtaagagtagaagcattcacttgatcaaagcaagttacaaggccaggtccacatacaagtggtgggaagctgactccagccttgatgggaggagtatgcagccatctaaaactggacacatgtagaatgcttctcctgaaagctctccatagctatgccttaggcatgctctcttcaaaatatagtatcttcagaggcctttcctaaccactgtatttaaaatagcttctcatcctactttcttcatccttcaccatttcttgaccctgttttactttctaccattacaattacccattatttcatggttcactgtctgttttctctatgaaagcaagtacttaatctgccttgttcattcccaagaaagagctagcatagtaggtactcaacaaatacacaggcaattctaatctctattttttattccacaataagatgatcaagctactaaacaactgaaaaagcaatgcactttagttagtaaaatgcactttagtaaaaacaatctaagtggaaataagatttttgtctcttctgtccagacaaaaaaaatgaagaatctatgtgttaagtacaaagtagaagctgggtgtgctggtgcatgcctgtagtcccagctacaggaggctgaagcaggaggaccacttgagccaaggagttcaaggctgcagtgagctatgatcatgccactgcactacactctgggcgacagagcaagacctcatctctaaaacaaaacaaaagacaaagtagaaagttacctgagtcttttccaagttatttaatttacagcatcagtctccaaatataataatattaagatagcagtttagaaattaactttttttcagatcactctaacataaaatctctcaactgaatctctagtttgtctcattttgttaagagctttaatattacatgggaagttcagagacttctatttccatccctcaacatgtagtgacagtcaacatgtcaggctctgtagcaccgtgatatcccagcaccagaccactccagccaccctctcattcaaagaagggctacaagatatggctggactactcgaatcacatctgatcttaatcaatccaggtatagaaagttgtactataaagaatactttccaaaattgttcactcaaataaaaacagatcaagtcattacagagcatttttccattttaataagaataacagacctactcaaggtaattttattctgtttatttaaataaggataagactacttaaaagactttttacatacaaaaatgtacaaggttaaacttttctgtactgaattacaaaacctgcacaagcatgtaataaaagagcacacttaaaaacattctgaccattatttagcctctaaaaattactgaagttcaacagtagtaaatagaggaagctcttacatatatatatatatatatatatatatatatgatttaatctactggcagttttacttaatgtaagtatttaaaaggtcacattgctattgaatgagtctctagatcaattttagaattgtctctcaaaacttaagtcaaccaaaatattatttcaaatagtaattccaattctgaagaattttaataccagcaaatatattatggcctcatagtagtaactgaaccaactttccaaagtgcctggtagctgtccagatgaattaggctgctttggaaaactgtactgtctctacagccattgagaagccattcagtgccctggtagggacctgagactttccagaattcacacagcagtctatgatccctcaaatgtaagaggacagggggtcagcctatcttcacctctcagtgaatgtggagggccaagcaatatgacttgcaaacctaagctagaagcttgggatctacagtaaggaggaaggagaattaaagtagagaaagaaaatgtataaggagaaagggaaaagaaggaacaaagagggaaaagaaaaaacaaggatgcctgctaatggcaggaagtggtaaagtgcctataactacaacttacaagccacccactaattctaatgccattcatttgcctactccaataataagaaaagctggctttactggaatatagaatctagagcaacattacccgcctcatgttagtgagtaactagtattctaaagttgtttgccatacatatcaagttcttctaacctttgaagcaaaccaaaacacttcaaaactcagggctcccagggctgctgctccagattcccagcattcagcatgcttcattatgtggagaaagacatttcaagacaagctgtatctatacaccttcagaaggaacaaagctctaagaaggtgggattatgttaacacatagtacatggtttagcgtttctccacatttcaaactcaaaatagctcaataatatgctgctacatgagcattgattctgaatgttcataatataaacttcaatttgaagcaacaatgttacacagttcagctgttattaccaacctactctgtaagttaaaatacaaataaaatattaattttattgagtaactaaaaataagttcccactgacttaaaatcgtcaaatggctaactctctctcaactaagagagcaacacagatggaagcagagaggacaactgaatataaaataaaatttgtcaatctactctataatctgcacttttaaaatccccttttgcatatatgtatgtataggatcacagttgcccaccaacattatgtctgtcagccctgcagataacaatttactgtaacgttaacaatttatgcaatacttagtatgttttatcttatgtgtacagatttacagtttggaataaaggcagaatgattaaaaactattgggttaaagtcttagtatggtacttacctgcaaggctgaattaattttttggaaggctattcaatagctgaactaaaatgcttgtttaacaaatcaaaagaggaataagactactttaaaacatattgaaaaaggtaaatcccaatttgaagatcaatcatataacgaaaaaagtatgaagtatcctttgctcttgcttagaaacacatagcagaacagtagaaactagaactcatgaatataaggtaaaccctattttcccactgatttccattatacaattggagtgaaaataccactcaaacaaaaataaacaaaaaatcttagcaggtaattctgtgtagaacagccatgtgggaattgtctatattacagctgcagggaatctcatgtaagctaggagtccatcttcctatgttgcactctgcagtgacttctgactccagtagctcctctattgcctactccatattacgctaatttttgcccctgactgctatgcttcctggactcttataaattctagaattctacccccactcctaactctctaaactttcttccatcgaataccacctctaacatgattactctgcctgaagactttttaaatcaacttcattttgaaaagattaagctcccacgagcgagtaatagctgaactcacagagtgagatcacagactgctcatgaaaagagtacgtaggactgctacatgacaagaacattctaaaggatgggccaggtacagaatcgaccagtcaactcataatatatgtatcaattgttacaacttcaaggaaaggagcaatagcaagcactgattcctttttgctttttatgggaagaagcaatgtaagcaattaaagaacagcatttttatctgtatattctgaatagttttccagcactactacaaagatgcttttcttggtgaacatttaaggatgaatgttgcagtatttactaaaatactgtgataaattggtatatgcttctgctttgtaaaagaaataaaatggcaggcaaactagtaaaatatttgagtttttaaaaaaaatctcaaaaatctcaaatttcccccaaagactctgaacaaggctaatgagagtaactccgaaaattcactgaatgcttttttttttttgagatggagtttcgctcttgttgcccaggctggagtgcaatggtgcgatcttggctccccgcaacctccgcctctcaggttcaagcgattctcctgtctcagcctcctgaatagctgggattacaggcatgcaccactatgcccagctaattttgtattttttagtagagacggggtttctccatgttggtcaggctggtctcaaactcctgacctcaggtgatctgcccacctcagtctctcaaagtgctgggattataggcgtgagccactgcgcctggccaattcaatggatgctttatagcacatttgtagctaataatttcagtagggtcaatataaatgacatatactaagccattggtttaaaaagatattctttcctaatcagggcaagacaggcaagaattttaaaaaaggaagggagggagggaagaagggaaggaaaataaatcctttatttttttaaacctatttgaaacctcttaagaaaattccacaataatcaggatttctgtaaatattgtcaatatatatgaacatatttgaaaaactacagttacagtatatttacatttttggaaacttttcttcagggccaagtaacatgttgtatcttcctttttgcttgtgggggcttcaggttattctgaaagacatgaacagaaatcagtttatacttgcagaaatatcagaaaacaactaaaatgaacatttcaaacaaccaaggtttactattaatgtattaatggaagatcactgctgccatctggtgggaatatatttaaagaaacaggggtgagttctctagctctgtggttctcaaatgtgtgtagtttagaataacttagagcacttaaaaacatgccccaggcctggtcttatcacagaaccaattaaaccagaatccataaaaggtagggggataaggctctgacttctttttgctttttttggaagctcctcaagtgatgttaacatacaatcagagttgaaaaccactgactgctccagatctgctttctccctgtccagcctatctcctccatcaactttacaatttaacaatccaaagtcaatgcaaataggctgggcaggtggctcacgtctgtaatcccagccgagtcaggtggatcacttgaggtcaggagtttgagaccagcctggccaacaggtttggtgaaaccctgtctctacaaaaataaaaaaaaaaaaaattagctgggtgtggtggcaggcgcctataatcctagctactcgggaggctgaggcaggaggattgcttgaacctgggaggcggaggttgtagtgagctgatatctcaccactgtactccagcctgggagacagagcaagactctgtctcaaaaaacaaacaacacaacaaaaacacaaagtcaatgggaaatgttaataagaagaaaaagatttatatgtgggccctacataaaaaagaatcttttatccttagtgtttcacatatagctctctcacactctctctctctatatatatatatatctcatatctataaaacagtaaaattttgtagggtagagaaatgctgtttaagagcctggaaaaaaaaaattctctgaggcttactccttatggcaatatttgagatgtggctttattgttctaactcttatcccacaccttcctcctctctcccacaaaggtagctgaaaggagtatggacgaagcatggcctccaaagtgtgtgccctgggatcaaacaaacctaaattcaaatcgcagcctggtggcttactaataactctggaattctggacaaacttatttaaatttactaagtttctgtttccttatctgtgaaataggaataacgaagatgcctacttcatagttactgaaaggattcaatgaactaataaaagtaaaaaactcatgaccagtcaggtggttttctttttccagtctactattttagaatgtttgaattttctgagttttgatccctttgatacatgattagatgataataataataaaggcaaagtattctacagaataatggctattaaactactaggtatttaaaagtaaaagcacttttctgaagcgcctatatatattttatattatatatatataaatcatctcacaaattaaactctaatacattgtgttaactgcactaaatgtgccaacaagcatccaaatgattcaacatagtggagcacaacataatagatttccccaacttctgctatccccacaaagctaggtaaattgagcagtaggcgaggcaagtggtaaatcttaaaaagattctggtgtctggtgtggttttaaggtatgcacaaacagacagacttaaggtcaggccccaaatgctacttaataaatgtgtgaccctggacaaattacttaatgttctaaaccttgctaataaaggaatatttatctgttttagttccaagacagttaaaggaactaaatgagaaaaatctaggaaaactgcctaacagatcctctctctacgtattttaagcagaaataacttgagtgaacttttaaaaacattaatcaccatggatttttaaattccaggattcaagtactggagtaataagttgtattatacaaatcagacagaccatcaaaagggttcaagaacagaatgtagcacagtcgacccacctcccgtcatgaggcagactgctcaagtttcattcagaccacttaccagcatggaaaccacccccatacttaccatggcctctgcctcttctttaggagcagctctctttaacttcactggagtagttccaacaggggacaatggtggcgacttcacagggcctgaaggacttttcctatgcgttaagtcatggttctgtttagcgtcattattattgtgttccgttttattgttcacaggcaaattggaagacaaaattaggggtgaaacactcgaagaggaatttgataattttctaaaggcattactggtaaagcttgcctgcgggggaggcttcagtcgatcattatctccattctctgtctttttcacttttatgcttgtacttgttgaacttccatcaaatacgatgaggggtcttttccttaacccatctacagtgctactcctgaaatcaaagagatgcactcttgaaaaataccatctggaacggcaaaccagttcactgggattcaagttaaaataagcagtaaacaaaaagattttctgataagactaatctgagactattaaaaatgaaattttctatgttcattctaaatgaaagaatttcctagtgttttatttcaaagtttaaaatatttatgtacaagaaattcaaagttagctttcatgtatacacaacatgcagctatttttaaaacatcaattaaccatctagccctggaacttaaaatgagatttcctagttaaaaaacaaacaccagcttattgatagggttatcttaaccatgtaatcagttattattttaaaaggatgataaactataaaactataccaagactaccacagcagcaatctacaaatggggcacagcattctactccattcagcaaaggtctctaaagccaagacattttctaaactaatcgtaactggacatttgtacaagttcaattgtaaaatctggcaagtgtctcatacttaccttctggaaatctaatttccactcttaatagtaaaggttaataaggaaagcattcatttgtttattacttattatacctcagataatatctatatcacctatctcacagatgaattgaaaaaaaatttatttttgagacggagttgcgctcttgttgcccagggtggcgtgcgatggcgcgatctcggctcactgcaacctctgcctcccaggttcaagtgactctcctgcctcagcctcccgaatagctgggatacaggtgcatgccacagtgcccagctaatttttgtatttttagtagagacggggtttcaccatgttggccaggctggtcttgaactcctgacctcagggtaatccgcccgcctcccaacatgctgggattacaggcgtgagccactgctcttggcccaaaaaaaaacccttttaattaaacatgttaaaagaatctgagatagccagttatcaggaagaacattttagccctgccactcaaagtgtgatccagggaccagcagcaccagcacagcaacgtcagtcagtatcttaggagcttgtaagaaatggagaatctggggcatcaacctgaatacatcagaactcaccttttaaccagatttctagcagttggccaaactcaacaattcttgggtcatcactgaacatcatttggtagaaaatgagaagtaagctcactgtatacccactgcctttgtagaagggaaacagggactgagagcagggtttgacagcttgcttaatctaagattcaagaagcacattaaagtttgagaagcacagggctatgttgctatggacctggtcctagctctgtgtgaccttgggcatgttacagcacttctcaggatctcagttcctccacagataaaataataagtagttcaacaatacaagatgatctcttggatccttccagttttaatgctctgattcaattgtgtatttaaaaaatagagtcaaagatcctttccaaaatgattttgggggactaatcaagacagttgtacaaagattgcttcaaaggaaagtatgactggcacataaagttttgcttactagaacaatatgcctgaatgtgctgatcaagaggaaaatactggctgaataacagcaaaagtaaattaaaagccatatgcagtgtaacccatatttatgaaagttaacaccactacatagtctgtactagtaagtaaagtaaccatcaagctaaaatggtcaatctaaaatgcattcttgatcaaaggtcagactgtgtgtgtattttccaaaagacaatgagcagacatgtattcttcgactattcttcataattggagaataatctcaatcattaaatttttctttgtaaaacagagattaaaactcagaggaacatactcccctttacccctaccctcctactctgtcttctctcactgcttctagtggattgcctatgacggtgccttacaaatagaaggccctaaaaaaaaattaattgatcaatagtatccacttgagatataatagacacagaagagttcacttaaggatcttaggacactttgtacttattaaccaatcaacaacactgattaatcaaatgtaattttctttaaaaaagaaaaaatcacttgcttgtggttttataaaactgtttttgaaattaaataattttaaatagcataacttaagctagttaacaggcccttcatttgtgtattattcaaagaccttagagttttacctgacttgactttttcctcaaaattcaggaaatcctattggctctatcttcaaaatacatgcatgctccaacccaccaaatttactattgtagtcaaagctgctgccatctattgcctggattacagtacaggcttctaatttgtttccctgcttccagtcttatacacaccgcttcccctccccacacaccttaaatcacttcttaggacagcagccagagtcatcttgtcaaaatgtacatctaatgatgtcaccactctgcttaaaaccttctagtggcttctcatctgagtacagccaaagtccttacaatgacttacaaagctttacatgatctgacaatctctcccgtttgcccccagtacaactcgttcttcctacttctccatccagccctgatagctgctttgttgttcctggtatatgatgggcacattccagatccagcctcttgtattctgcctggaatcctagcttgttttcttcttcctacaggtctctctactaaaatgtcatttttcactaagatcttcctggataatttaccaaaaattgtaatctttctccctggcctttattactatataacaataccatattttaactgttgttatgtttctcccatcaaaaatatgagcagggaattttgtcagttttattcactgctatacgcacagtgcctggtgctcaatagatagtcattgagtaaataaattttttacttaagtttatctcaggaaaaatcaataacttatatataactttagttatataagataaattgaaagctagaaccaccaaaaagtaccttttagtctcatttttaatctcatgttgttctcttttcttttccatcattttcccccatctattcttcggcaaatccctctgaggcaatggtattgcatgttggacataaaggtcagtaagactgtctttgtttactcttacatcagtttcaacagctatgttcttctgcgggaaaggaaacaaaagtaatttcaaaacaatgtttttaattttaacaagtaaccaccttacctaacatggtaaaacattactgcttaaataacaaattataaaaagccattttcacaataacacgcgcacttagagacagtgttaaaggttaaattctgtagatactaggttcagcctcatcttaaaaacaatggtcatattttctcagtgtgacagggattgctgtccacaactgctcagccaacacaccaagcatgaaagatcatttccagtaaaattatcttaatatacaaaggggattgaaaatgggagactgcctgttgacaa

SEQ ID NO: 362 - DNA, 2523 bp, Homo sapiens
gcggccgccagctcccgcgaccgcctctcctgcccctcgccggtacctcagcaaggtgccactagaagcgccaggctggggccgcctctgagcgccccgcgggggccatggatggtgaaacagcagaggagcaggggggccctgtgcccccgccagttgcacccggcggacccggcttgggcggtgctccgggggggcggcgggagcccaagaagtacgcagtgaccgacgactaccagttgtccaagcaggtgctgggcctgggtgtgaacggcaaagtgctggagtgcttccatcggcgcactggacagaagtgtgccctgaagctcctgtatgacagccccaaggcccggcaggaggtagaccatcactggcaggcttctggcggcccccatattgtctgcatcctggatgtgtatgagaacatgcaccatggcaagcgctgtctcctcatcatcatggaatgcatggaaggtggtgagttgttcagcaggattcaggagcgtggcgaccaggctttcactgagagagaagctgcagagataatgcgggatattggcactgccatccagtttctgcacagccataacattgcccaccgagatgtcaagcctgaaaacctactctacacatctaaggagaaagacgcagtgcttaagctcaccgattttggctttgctaaggagaccacccaaaatgccctgcagacaccctgctatactccctattatgtggcccctgaggtcctgggtccagagaagtatgacaagtcatgtgacatgtggtccctgggtgtcatcatgtacatcctcctttgtggcttcccacccttctactccaacacgggccaggccatctccccggggatgaagaggaggattcgcctgggccagtacggcttccccaatcctgagtggtcagaagtctctgaggatgccaagcagctgatccgcctcctgttgaagacagaccccacagagaggctgaccatcactcagttcatgaaccacccctggatcaaccaatcgatggtagtgccacagaccccactccacacggcccgagtgctgcaggaggacaaagaccactgggacgaagtcaaggaggagatgaccagtgccttggccactatgcgggtagactacgaccaggtgaagatcaaggacctgaagacctctaacaaccggctcctcaacaagaggagaaaaaagcaggcaggcagctcctctgcctcacagggctgcaacaaccagtagctcatggggccttggaggagcctggcctctcagcctgcataacagactgaaatgtgctcaggccctggccaggagggcccagggtcattcttttaacaaaaggattattttgttgtgttttaatttgtcactcggaacttcaggatggaggaccctgaccctaagcctccttcagatctctggcccaggctcaagccctagagatgggcagggcctaggggctgggagctgcctgctgccatagcagcacctttagctaggttggcccgagtgaggcctctgtgctgtcctgccctggtgcatggccttagctttctaggccactgggagttgtggctgggcttcccatcttccacagagacatctccctgtgggatgggcagatgggcctggccttgagaaaggcattggccattggttgccatggtgaccagggaccacgttgctgcctgtgaatgctgagtgagcgagtaagggaggaggggcgattgagggttcacctctgccttggggaggctgatttctcacacactggctggccctctcattctcactcctccttgggccctgaggctgctggatccagtctgcctgcctccctgtgcagtccagccctgccttgctgcagccccagcccagatggcactcagcgctctcccctgagggagtccctgggcctagccatcccctcactattcccgacccaaagggtgacttttcatctgaacttaaggtgggagatatttttaacttttttccactttggaaaatgtcactgtgacaaaagccagcatactttccctgcacccatctgctcaccagatctcaggcaggaaagcccctctctgttgaagtcaggggctatcttttggtatacttgtgtgaaagtggctggttgggagcagagctaagtggcttcccattaacctgaggtctctttctttactctgggtcagacctgaggttggggaaggcgactgagccatgctcagaatgtctggtcctggcttgggcctgagtagggcagagagggcctttcatggctgatcagagcttaccagccccaccccaccatggtagccttagggtgctgagtgcctgatactgcctgacaagtgcctgacacgcagcctagttccttcctggcccctctctcactggctgggaaaccctagaccatgtcagataggacaacactgctgggttttacatccagatagtaataaacaccatttcatcattaaaaaaaaaaaaaaaaaaaaaaaaa

SEQ ID NO: 363 - DNA, 6479 bp, Homo sapiens
agtctccttgctctgggctgctccaggccaggccatgcggaaagtgtgttgttatgaggattcaatgaggagacctgtatgaagtgccttcccctgtgcctggctcatagcgaaaacagaagaacagattgcagcagaagaggcctggaatgagacggagaaggtgtggctggtccatagggacggcttctcactggccagtcaactcaaatctgaggagctcaacttgcctgaggggaaggtgcgtgtgaagctggaccacgatggggccatcctggatgtggatgaggatgacgttgagaaggctaatgctccctcctgcgaccgtctggaggatctggcctcactggtgtacctcaatgagtccagcgtcctgcacaccttgcgccagcgctatggcgctagcctgctgcacacgtatgctggccccagcctgctggttcttggcccccgtggggcccctgctgtgtactctgagaaggtgatgcacatgttcaagggttgtcggcgggaggacatggcaccccacatctatgcagtggcccagaccgcatacagggcgatgctgatgagccgtcaggatcagtcaatcatcctcctgggcagtagtggcagtggcaagaccaccagctgccagcatctggtgcagtacctggccaccatcgcgggcatcagcgggaacaaggtgttttctgtggagaagtggcaggctctgtacaccctcctggaagcctttgggaacagccccaccatcattaatggcaatgccacccgcttctcccagatcctctccctggactttgaccaagctggccaggtggcctcagcctccattcagacaatgcttctggagaagctgcgtgtggctcggcgcccagccagtgaagccacattcaacgtcttctactacctgctggcctgtggggatggcaccctcaggacagagctccacctcaaccacttggcagagaacaatgtgtttgggattgtgccactggccaagcctgaggaaaagcagaaggcagctcagcagtttagtaagctgcaggcggccatgaaggtgctgggcatctcccccgatgaacagaaggcctgctggttcattctggctgccatctaccacctgggggctgcgggagccaccaaagaagctgctgaagctgggcgcaagcagtttgcccgccatgagtgggcccagaaggctgcgtacctactgggctgcagcctggaggagctgtcctcagccatcttcaagcaccagcacaagggtggcaccctgcagcgctccacctccttccgccagggccccgaggagagtggcctgggagatgggacaggcccgaaactgagtgcactggagtgccttgagggcatggcggccggcctctacagcgagctcttcacccttctcgtctccctggtgaatagggctctcaagtccagccagcactcactctgctccatgatgattgtcgacaccccgggcttccagaaccctgagcagggtgggtcagcccgcggagcctcctttgaggagctgtgccacaactacacccaagaccggctgcagaggctcttccacgagcgcaccttcgtgcaggagttggaaagatacaaggaggagaacatcgagctggcgtttgacgacttggaaccccccacggatgactctgtggctgctgtggaccaggcctcccatcagtccctggtccgctcgctggcccgcacagacgaggcgaggggcctgctctggctattggaagaggaggctctggtgccaggggccagtgaggacaccctcctggagcgccttttctcctattatggcccccaggaaggtgacaaaaaaggccaaagcccccttctgcacagcagcaaaccacaccactttctcctgggccacagccatggcaccaactgggtagagtacaatgtgactggctggctgaactacaccaagcagaacccagccacccagaatgtcccccggctcctgcaggactcccagaaaaaaatcatcagcaacctgtttctgggccgcgcaggcagtgccacggtgctctctggctccatcgcgggcctggagggcggctcgcagctggcactgcgccgggccaccagcatgcggaaaacctttaccacaggcatggtggctgtcaaaaagaagtcactgtgcatccagatgaagctacaggtggacgccctcatcgacaccatcaagaagtcaaagctgcattttgtgcactgcttcctgcctgtagctgagggctgggctggggagccccgttccgcctcctcccgccgagtcagcagcagcagtgagctggacctgccctcgggagaccactgcgaggctgggctcctgcagctcgacgtgcccctgctccgcacccagctccgcggctcccgcctgctcgatgccatgcgcatgtaccgccaaggttaccctgaccacatggtgttttccgagttccgccgccgctttgatgtcctggccccgcacctgaccaagaaacacgggcgtaactacatcgtggtggatgaaaggcgggcagtggaggagctgctggagtgcttggatctggagaagagcagctgctgcatgggcctgagccgggtgttcttccgggcgggcaccttggcacggctggaggagcagcgggatgaacaaaccagcaggaacctaaccctgttccaagcagcctgcaggggctacctggcccgccagcacttcaagaagagaaagatccaggacctggccattcgctgtgtacagaagaacatcaagaagaacaaaggggtgaaggactggccctggtggaagctttttaccacagtgaggcccctcatcgaagtacagctgtcagaggagcagatccggaacaaagacgaggagatccagcagctgcggagcaagctcgagaaggcggagaaggagaggaacgagctgcggctcaacagtgaccggctggagagccggatctcagagctgacatcggagctgacagatgagcgtaacacaggagagtccgcctcccagctgctggacgcggagacagcagagaggctccgggctgagaaggagatgaaggaactgcagacccagtacgatgcactgaagaagcagatggaggttatggaaatggaggtgatggaggcccgtctcatccgggcagcggagatcaacggggaagtggatgatgatgatgcaggtggcgagtggcggctgaagtatgagcgggctgtgcgggaggtggacttcaccaagaaacggctccagcaggagtttgaggacaagctggaggtggagcagcagaacaagaggcagctggaacggcggctcggggacctgcaggcagatagtgaggagagtcagcgggctctgcagcagctcaagaagaagtgccagcgactgacggctgagctgcaagacaccaagctgcacctggagggccagcaggtccgcaaccacgaactggagaagaagcagaggaggtttgacagtgagctctcgcaggcacatgaggaggcccagcgggagaagctgcagcgggagaagctgcagcgggagaaggacatgctcctcgctgaggctttcagcctgaagcagcaactagaggaaaaagacatggacattgcagggttcacccagaaggttgtgtctctagaggcagagctccaggacatttcttcccaagagtccaaggatgaggcttctctggccaaggtcaagaaacagctccgggacctggaggccaaagtcaaggatcaggaagaagagctggatgagcaggcagggaccatccagatgctggaacaggccaagctgcgtctggagatggagatggagcggatgagacagacccattctaaggagatggagagtcgggatgaggaggtggaggaggcccggcagtcgtgtcagaagaagttaaaacagatggaggtgcagctagaggaagagtatgaggacaagcagaaggttctgcgagagaagcgggagctggagggcaagctcgccaccctcagcgaccaggtgaaccggcgggactttgagtcagagaagcggctgcggaaggacctgaagcgcaccaaggccctgctggcagatgcccagctcatgctggaccacctgaagaacagtgctcccagcaagcgagagattgcccagctcaagaaccagctggaggagtcagagttcacctgtgcggcagccgtgaaagcacggaaagcaatggaggtggagatcgaagacctgcacctgcagattgatgacatcgccaaagccaagacagcgctggaggagcagctgagccgccttcagcgtgagaagaatgagatccagaaccggctggaggaagatcaggaagacatgaacgaattgatgaagaagcacaaggctgccgtggctcaggcttcccgggacctggctcagataaatgatctccaagctcagctagaagaagccaacaaagagaagcaggagctgcaggagaagctacaagccctccagagccaggtggagttcctggagcagtccatggtggacaagtccctggtgagcaggcaggaagctaagatacgggagctggagacacgcctggagtttgaaaggacgcaagtgaaacggctggagagcctggctagccgtctcaaggaaaacatggagaagctgactgaggagcgggatcagcgcattgcagccgagaaccgggagaaggaacagaacaagcggctacagaggcagctccgggacaccaaggaggagatgggcgagcttgccaggaaggaggccgaggcgagccgcaagaagcacgaactggagatggatctagaaagcctggaggctgctaaccagagcctgcaggctgacctaaagttggcattcaagcgcatcggggacctgcaggctgccattgaggatgagatggagagtgatgagaatgaggacctcatcaacagtgagggagactctgatgtggactcggagctggaggaccgtgttgacggggtcaagtcctggttgtcaaaaaacaagggaccttccaaggcagcttctgatgatggcagcttaaagagttccagccccaccagctactggaagtcccttgcccctgatcggtcagatgatgagcacgaccctctcgacaacacctccagaccgcgatactcccacagttatctgagtgacagcgacacagaggccaagctgacggagactaacgcatagcccaggggagtggttggcagccctctcaccccagggcctgtggctgcctgggcacctctcccaggaagtggtggggcaccggtctcccccacccgactgctgatctgcatgggaaacaccctgaccttcttctgtcaggggcactttccaggctatgggtgtctgatgtctccacgtggaagaggtgggggaaagaggagtttctgaagagaactttttgctcctctgtctcaaaatgccagactcttggcttctaccctgtgtcaccgtgggcagtggcaggtggcctggcactgcatggagccagcacgttgacctccctctcagctccctgctcagggacggtggacaggttgcctactgggacactctaggttgctgggtccatggggaggattgggggaggagaagcagtgccttccctctcgtgtggggtgggggctctctcttcttggtgcctgctgtctttctactttttaatttaaatacccaacctctccatcacagctgcatccctgagagtgggagggggctgtagtggtagctggggctcccaagaacgactcgggaatgtcatctccatcttcacccttcagagagcagtcctttctctgtgcagctggagacgctggtgaggagagccgggtccaggttcttaagaatgaggtgcggaggggctctccggtgctgctgggctgggttgagcaagcctacgcagacaagtgtgtgtgtggaccatccgcacctccagcccccaccccaccctctttgtctcagcgtgttatgtgcaatgacctatttaaggtaaacccattccaactacagcagttcagggctgatccaagcactgcctccctcctgctctgtccaggtggtctggaccataaactcaacttgagagggaaggcttggggttgaggacttgtgatcagaaaaactgaagatggaagttttggccggtgctcattagacatgagtcctcactctgtgtcctgagcccgtgtcattcttccaacctccctgcccccacacacttatcccagacacaacaccatgtggtctggaggtcccagcccccaccctaaaaaggttatccctgagaactccaccagacttgggagcccaagtgcagtgcctggtgctgctcccatctgccgccccccttctctcctgcaattggtttgtactcactgggctgtgctctcccctgtttacccgatgtatggaaataaaggcccttttcctcctg

SEQ ID NO: 364 - DNA, 568 bp, Homo sapiens
ctccagacccgcacgccgcgcgcacagagctctcagcgccgctcccagccacagcctcccgcgcctcgctcagctccaacatggcaaaaatctccagccctacagagactgagcggtgcatcgagtccctgattgctgtcttccagaagtatgctggaaaggatggttataactacactctctccaagacagagttcctaagcttcatgaatacagaactagctgccttcacaaagaaccagaaggaccctggtgtccttgaccgcatgatgaagaaactggacaccaacagtgatggtcagctagatttctcagaatttcttaatctgattggtggcctagctatggcttgccatgactccttcctcaaggctgtcccttcccagaagcggacctgaggaccccttggccctggccttcaaacccaccccctttccttccagcctttctgtcatcatctccacagcccacccatcccctgagcacactaaccacctcatgcaggccccacctgccaatagtaataaagcaatgtcacttttttaaaacaaaaaaaaaaaaaaaaaaa

SEQ ID NO: 365 - DNA, 1610 bp, Homo sapiens
cccggaagctccagcctgaaccatgtttttcacttgtggcccaaatgaggccatggtggtctccgggttctgccgaagccccccagtcatggtggctggagggcgtgtctttgtcctgccctgcatccaacagatccagaggatctctctcaacacactgaccctcaatgtcaagagtgaaaaggtttacactcgccatggggtccccatctcagtcactggcattgcccaggtaaaaatccaggggcagaacaaggagatgttggcggccgcctgtcagatgttcctggggaagacggaggctgagattgcccacattgccctggagacgttagagggccaccagagggccatcatggcccacatgactgtggaggagatctataaggacaggcagaaattctcagaacaggttttcaaagtggcctcctcagacctggtcaacatgggcatcagtgtggttagctacactctgaaggacattcacgatgaccaggactatttgcactctttggggaaggctcgaacagctcaagtccaaaaagatgcacggattggagaagcagaggccaagagagatgctgggatccgggaagctaaagccaagcaggaaaaggtgtctgctcagtacctgagtgagatcgagatggccaaggcacagagagattacgaactgaagaaggccgcctatgacatcgaggtcaacacccgccgagcacaggctgacctggcctatcagcttcaggtggccaagactaagcagcagattgaggagcagcgggtgcaggtgcaggtggtggagcgggcccagcaggtggcagtgcaggagcaggagatcgcccggcgggagaaggagctggaggcccgggtgcggaagccagcggaagcggagcgctacaagctggagcgcctagccgaggcagagaagtcccaactaattatgcaggcggaggcagaagccgcgtctgtgcggatgcgtggggaagctgaggcctttgccataggggcccgagcccgagccgaggctgagcagatggccaagaaggcagaagccttccagctgtaccaagaggctgctcagctggacatgctgctagagaagctgccccaggtggcagaggagatcagtggtcccttgacttcagccaataagatcacactggtgtccagcggcagtgggaccatgggggcagccaaagtgactggggaagtactggacattctaactcgcctgccagagagtgtggaaagactcacaggcgtgagcatctcccaggtgaatcacaagcctttgagaacagcctgagccttcagccctcacagatgcccagcctcatagctgaagttgcctgaatgatcctcctgttgcatgtaacccactggcctccctgagcatgtccattgacagtgaggtcccacccctcatctctccttgccaaatagtttgtgccttgtcttgaagggggttgctccccttgccaacctcacactgctatgattgccaactccagcggtcccatgtcagccttctgatgatcccactccaccccacctcaacttatttaacttcctaattaaatcagactgtttgaaaaaaaaaaaaaaaaaaa

SEQ ID NO: 366 - DNA, 1580 bp, Homo sapiens
gggggcatgccccagaggtacagatgtatatgtctcccaggaagtctctgtgggtgaaggactgatctcaagttgtggctgacactagttaaagccaaggtagagggctgtttcagggtctacattgagactacagttgatatgcctacctcctgagacactagtgtgtgagtctcctcctgggcccctgggcaaatggttttggcagcatgaccaaggcctaaatggggctgaaggcaagcacaggaggatgggtcccttttcaggtctggagatggaatcactgttgctatagcaggcctttttatgagactaacctggcctctccactaaaggatgtgtgactttctggggacagaagagtacagtccctgacatcacacactgcagagatggataaccaaggagtaatctactcagacctgaatctgcccccaaacccaaagaggcagcaacgaaaacctaaaggcaataaaagctccattttagcaactgaacaggaaataacctatgcggaattaaaccttcaaaaagcttctcaggattttcaagggaatgacaaaacctatcactgcaaagatttaccatcagctccagagaagctcattgttgggatcctgggaattatctgtcttatcttaatggcctctgtggtaacgatagttgttattccctcacgtcattgtggccattgtcctgaggagtggattacatattccaacagttgttactacattggtaaggaaagaagaacttgggaagagagtttgctggcctgtacttcgaagaactccagtctgctttctatagataatgaagaagaaatgaaatttctgtccatcatttcaccatcctcatggattggtgtgtttcgtaacagcagtcatcatccatgggtgacaatgaatggtttggctttcaaacatgagataaaagactcagataatgctgaacttaactgtgcagtgctacaagtaaatcgacttaaatcagcccagtgtggatcttcaataatatatcattgtaagcataagctttagaggtaaagcgtttgcatttgcagtgcatcagataaattgtatatttcttaaaatagaaatatattatgattgcataaatcttaaaatgaattatgttatttgctctaataagaaaattctaaatcaattattgaaacaggatacacacaattactaaagtacagacatcctagcatttgtgtcgggctcattttgctcaacatggtatttgtggttttcagcctttctaaaagttgcatgttatgtgagtcagcttataggaagtaccaagaacagtcaaacccatggagacagaaagtagaatagtggttgccaatgtctgagggaggttgaaataggagatgacctctaactgatagaacgttactttgtgtcgtgatgaaaactttctaaatttcagtagtggtgatggttgtaactctgcgaatatactaaacatcattgatttttaatcattttaagtgcatgaaatgtatgctttgtacatgacacttcaataaagctatccacaaaaaaaaaaaaaaaaaaaaaaaaaaaaaa

SEQ ID NO: 367 - DNA, 905 bp, Homo sapiens
gtcccgggagccctcagcagcagttggagctggtgcacaggaaggatgaggaagaccaggctctgggggctgctgtggatgctctttgtctcagaactccgagctgcaactaaattaactgaggaaaagtatgaactgaaagaggggcagaccctggatgtgaaatgtgactacacgctagagaagtttgccagcagccagaaagcttggcagataataagggacggagagatgcccaagaccctggcatgcacagagaggccttcaaagaattcccatccagtccaagtggggaggatcatactagaagactaccatgatcatggtttactgcgcgtccgaatggtcaaccttcaagtggaagattctggactgtatcagtgtgtgatctaccagcctcccaaggagcctcacatgctgttcgatcgcatccgcttggtggtgaccaagggtttttcagggacccctggctccaatgagaattctacccagaatgtgtataagattcctcctaccaccactaaggccttgtgcccactctataccagccccagaactgtgacccaagctccacccaagtcaactgccgatgtctccactcctgactctgaaatcaaccttacaaatgtgacagatatcatcagggttccggtgttcaacattgtcattctcctggctggtggattcctgagtaagagcctggtcttctctgtcctgtttgctgtcacgctgaggtcatttgtaccctaggcccacgaacccacgagaatgtcctctgacttccagccacatccatctggcagttgtgccaagggaggagggaggaggtaaaaggcagggagttaataacatgaattaaatctgtaatcaccgccaaaaaaaaaaaaaaaaaaaaaaaaaaaaaa

SEQ ID NO: 368 - DNA, 18974 bp, Homo sapiens
tcccctactttcttcacattctgcagtaaacttggaggctgcatgttgaatatgaaagtataatgaaataaaagaagcctagaaccaggaatcatacctggggtaatccaatcagaaatatcctcattgagtgtttcatgagccaggaaaacttttattaagtcacaataaaatctggaagtttatacagcaattagcttagtctaacacttgtcagttttgtgcatatttcttacagcatatgcattacctgccaaataaaagcaaacacttctaggtccctggcgaatatgggattcctccattgactgactgattatgggtcctgagttgaacttgctctgcatgaaggatgtaggcgatcaagtggcttgttttgcctctggccaaatctctaccactatgcttaagatgcgattaattatgtacaacaaacccccatgacacacgtttacctatgtaacaaacctgctcatcctgcacatgtacttctgaatgtaaaaataaaagtaaaaaaaaagaaaacaagaggtggttattattctactgtgggagaaattataggcccataatggtaactaatcaccacggtcttacctcattataatactgcatcggtaagttcatcaacataagcaagttagatctgataaccaaggggcttacagtttctaatttgtatttgacacatggtctgccttctggaagagcagcatagaacctagatgtctttgattaaggtcagtaaatgattgagtgttaatcccattcatttcccaggaaaaggaaacctctttacaagtcaccaccagggattctccaatcacacataggaaaaatttccaggaagacttctataaaacacatgtattaacatctccgaaaacatagttgaaaggacttccctgggcccttttccttagttcctcatctagactatcaagcggtttcctctccaaatgatgggaagaaagtgcatttgtctattacacacttgtattactctattcacttaagcactgtgtcccagtaatggggtctagttatgtctggcttgaaatgacccacatatttgtttctcattcttaggaagtggagtgtttctgtatgtgtatatgtgatgggggtaggccaggagattttttatctaggcaatacccagcctgaaatcattattagcatgacatgagttaaacgtatttctattttagaaagatgttttcaacagcaggatgaagaatcaattggaagagctggtacattgaaagaggtgaatctagactttgggaggcttcttaaagtatattgaactagtctaggccgtgggatatgttcaatagtaatggtagtagaaatggcgactgacattttggaattattttacagatacaatttctacaacttggtggaacattttttaaaatgtaggttttattattcggctatggtgaaaacaacagatcagaagatgatgccactggaaatatagtttgttgtttacagttcctaagaagcgggggcatgccacaccatgcagggccacattggtagcaccagagtccgtcaggaggcagagggagcaagaggaaattataggcacaagcttttattgttgttactgcagaaaaggcaaggcaaggcagggtaagcagggataggactggctagtttgaataacctcagtgggctctggggtagagggtctgtctctagttgtctggtacctggacctgtgatgattagggctgaataacagtgtctacttgggtgtaaaagccaggtagaggaggtggttcagaggaagggctctggattgcttagtgtgcataaggcatgctccagagcaaatcttttgctattttttagaactaactagccctggtaagtgcagtctcttcccagatgccagaacatcaagaacacagaaaagaagacaattgggttaatacatgtttagcatgagaaatgaggaagtaagggaaataaagtcaaagagatttccaccttggatgactatgtcaaagtgaaacaccattaactttccagggaactaaactttattgagcacctactctgtgtcaggcactgctctaaaatctttacatgaataatctcaatactcagagcaaagctttgacatggaggttgtttttatcttaactctactggtgtgttgatggagtctacaagagtttgtgcccagtccaccacaaaatggtccctcacagcttggtttttgacacgttggattggaagtgcttggaggatattacagtagaactatctaggacttagcatacataatattcctgttttaaatcaggttcttatttaacagaaacttacattgcacttgctactttccagacactgtcctaaaagctttacaaatgccagttcatttaatcccaatacaatactttgagatacatattatcatcttcattctatccacattttcaatcctcatcatagctctcatttatggaatgtaatgatgatgctctagactagacgttttacgtaagttagcttaattcagtaattcaaaacacatgcgattatcttcgttttaaagaccagaaaactaaaggttggtaggtttgtataatttgactaccattgcgtatctttattttaatacattttataaatgcaagcttctgctatgattaaaagtgattaccacattttacagaccagaaagtaataataagtgttggtgaagatgtgaaaaaatgagaactcctgtacaccatttgtgggaatgtaaaatggtacagatgctgtggagaatcatatggtgggtgctcaaaaaattaaaaatagatttaccacatgatccagcaatctcacttctgagtacgtatccaaaagaattgaaaacagagactttaagagatatttgtacaaccatgtttatggcagcattattcacaatagctaacgtgtggcaacaatgcaagtgtccatgaacagacaaatggataagcaaaatgtggtctatacatacaatggaatattgttcagctttaaaaaggaaggaggctttgatctatactacacagaaaagaaccttgaggacattatgcaaagtgaaataagccagtgacaaaaagatacatactgtatgattccacttctaagagctgcctagagtagtcaagattatagagacaaaagtagtgcatagattcaagggcctagggaaaggggaaatggggagttatttattaatgaatagtggtgatgattgtacaaaaatatgaacataattaatgccactaaattgtacacatacaaatggtcaagataataaattttatgttatgtcatgttatgttatgtgattttaccataatacagaaaatgaaaaaagaaaagaaagaaagtaaagcttagcggtttacatgacttgaccaatgcctcaaagccatgagtcacccagctgagatctgaacttcagtatattccattctgaaatcccagacttttcccaatcttcttgtacttttcaaactgtgtttcagttgaggtttattttcagttttgtatgtgagtttcttcacaagaaggggcgggccaaattgtgtcctgcaaaaacctacatatcgaagtcctaacccctctacctcagactatgactgtatatggagagagagccttgaaagaggtatgtaaggtagaatgaggtcattatggtgggccctaatccaacataactggtgtccttataagaaggggagattagaattcagacacacttgctgacaccttgagttcagactggaagcctctagaattgtgagaaaatgaatgtctgttgtttaagccacccagtctgtggtatttccttatggcagccccagcaaactaatacaaatagtgtttccacagctgaaacaaaattggaaaatcaccgtcatcctagagagttacaagggctattttaatagaacctgattgttttcctaaattcaccaagcccaggcagaggtcagatgactaattgggataaaagccaactagcttcctcttgctgtttctttagccactggtctgcaggcgttttcttcttctaacttcctctcctgtgacaaaagagataactattagagaaacaaaagtccagaatgctaaggttgccgctttcacttcctctcaccctttagcccagaactgctttgaatacaccaattgctgtggggcggctcgaggaagagaagacaccagtgcctcagaaactgctcggtcaaacggtgatagcaaaccacgcattcacagggccactgctgctcacagaagcagtgaggatgatgccaggatgatgtctgcctcgcgcctggctgggactctgatcccagccatggccttcctctcctgcgtgagaccagaaagctgggagccctgcgtggaggtatgtggctggagtcagctcctctgaactttccctcacttctgcccagaacttctcactgtgtgccctggtttgtttatttttgcaaaaaaaaaaagagttaaattaccttaaagactcaagaagccacagagatcaaataattcattgttacagggcactagaggcagccattgggggtttgttccatttggaaattttgagtgctaacaggggcatgagataacatagatctgcttaaggtccctgctctgctaccttgtggctctgtgaagaaattatcaaacctgtctgagactagttttcgcatctgtaagagaattataataccttcttcactagagagtaagcagactgcttcagtgtcatttcttcccactggtggtctttacactcagcttcaagcagtcaccctgctcctttcaatctcaggaaaaagatggcttttgtgtgtgtgtctctagagaaagaactttctaagtgggtgtcagacttctgtatgcagtaatatagtttagtccagaggatgaaaaaaataagagaatgaaaaaggaaaagagagagagagagaagaaaaaagcaagagggaaatatgtataatgtcagctaatgcaacagtttctttcttagtgaaataccaatcagctggttggtaatcttattcatgatggatctcttttgtttttcccctgcgcagacttcacagttgctttagaaacccatagtagagccgaacagctaagaaaatgatttacagtgaggcagggtcagaaactcaagagagaaaaagccagctgcagtcctgaagttgaggatataggagaaaatcaagtaatatttagcaaagactaattcattatcttgaagccatcccttccctcaattccctgcccatagtcctcctccttgtcctcttctctgtatccctctgctgttaggttaatggagatagattttctaattaggctcactgcgagataaaaccacagccaaacttgacttcttttccccatgtaccttttcctgtcagtccctgaagcctgtccatccctgcccatccccttagttccactgtaaggcaggccctcatttcccctggcattgactcttacacactaactgctttcctgattccagtcttcttcctttaactcattctgcacgttcttgtttgttatgtacttgcatttgttgttattatttttccttaggcttcaatctaacaaattactctccttaaaaacttttaataactctccattgccattagaacagctttctaccacagggcctttgcactggctatttcttctacctagaatgctagatcagtgctatccattggcaatattatgtgagccacatatgtacttttaaagtttttagtagcctcattaaaaaaagaaacaagtgaatttaatttcgataatagttttatttaacttagcgtatttaaaataatgtttaaaattttaatatatatttacctattattgatatttttacattccttgtttggtactaagtctggaatttagtatatattttacatttaccacacttctcaatttacactattcacatttcttgtgtttgataactgtgtatggctagtgactaccgtattggtcagtgcagcccaagtccttttcatgctttaatcactccattcagatctctgattaaatgtcccctcctcagggcagtcttccttgattgccccatgtagagctctccagcctcacttatttgcctcaaatccccttatactgcttaatatttttttttctagagcacaacattttatatttttgtttgtttattttctctctctccctttgtaatggaatcggtaaggaggcaggatcattgctggttttatttaccactatatttccagtggccagcacacagtagccgctagatgtgtaagtgataaatgattgaaataattgctgcaggacaaagtctgaggccctcctgatctggcttgccctcttacttagatttcaccactcccaccactcaccagctaatctgagtttgttttccactctttacgtgctcacgttgtcctctccttaggacatgtttttcttcccctttccacatatctaaaccttactcatcttccaagacccactttaaaatcttccttttctgggaagcctttcctgaatccagacttgatctctgctttctctgaaccacagggcatattttctaagcctattttatggccccttgagatagtgttagctttgctcctatctaaactcttactctagactgtgagtccattgaagtctggagctgcatcatatttttctttgtaatgcccacagcacttggcaggaaatgcctacaatttggacttaagtaaaccttcatttaatcagttattcaatcagttagtgattcagcaaatatttattgagcaccaaccatttgccagacaccattctgagtgctggagacaaagcagtgggcaaacccatcaaacttgcaatggaatacaggagatgaacaatacgatgagaacaatcagatagacaacataatgttagatggttgtgcttcctgtgaaagggaataaaagagggcaaagaaagagtgcctggcactgtttctattagacaatattgtctttgaggctccatggcttgcaacatttaagcagacatacgaatgaagatctgcatgtttgaactctgactttgcgcatattacttcatttctttgaatttccattttcctcatctttaaatgcttatttgaagattaagtgaaagtatataacaaacaagaactatgcaggcgtatggtaagggattaatgatagatgataataattaatgttgacatctattgatcacttatactgtagcgggcttttaaataaactctttaaacaccttatctcatttaatccttcaaacattctattggtttcaaacaacagaaaactacaattagctggcttctgcaaggaattttgttggaggaaatgagagcattcagaaattagatgggagcgttagagaattaggcttacaaagaatgtgggaaagtaggctagaaagcagtgtaaaaacaaagacagcataaagcacttgaccttatttactaggttccaccatgggaatccatgcactctaaagatttccccctatttctacatcactttgctcaagggtcaatgagccaaggaaaagaatgcagttgtcaaaatctgggccatgactaaggaaggtctggacatcttgactgccagacagtctccccaatgatatggagtatttagaatgatactggatattttatttattttttgtattttcaacttttaagttcagaggcacatgtgcagagcatgcaggtttattacataagtaaatgtgtgccatggtgatttgctgcatagatcatgaaaatatggaacgcatcatggatttgtgtgtcatccttgtgcaggggccatgctcatcttctctgtatccttccaattttagtatatgtgctactgcagcaagcacgatattggatattttattacctacattttacatatgataaaatgaggctcactgaggtttttcttttgttcgttttattttgttttgtttttaaagacttggccctaaaccacacagaagagctggcatgaaacccagagctttcagactccggagcctcagcccttcaccccgattccattgcttcttgctaaatgctgccgttttatcacggaggttagaatgctgagcacgtagtaggtgctctttactttctaatctagagtaagacaatttataagcatgaattgagtgaatggatggatggatatatggatggaaggatggacagatggatgaaaggttgactgaattttgtgcttgcacaaaaagaggcccctctccaccatctctggtctaggagaggggagttgggagaccatgcagtaaagatacttcatgtcatgtgtaatcattgcaggtggttcctaatattacttatcaatgcatggagctgaatttctacaaaatccccgacaacctccccttctcaaccaagaacctggacctgagctttaatcccctgaggcatttaggcagctatagcttcttcagtttcccagaactgcaggtgctggatttatccaggtaatgaatccacttttacatactgcacaaggtgaggtgttcattgtcctatcatttcattattggactggaaagcttggtttgtggagtctcatcttcattcacttattcattcatacaacagatgtcttattaactatataaccttgagcaagctacctctattctccaggtctcagttttctaatctgtgaagtaggcagttggctgagacagcttctaagggcaattctaattttaggttttcttttaagacaggagagaaaattagcttaaattctttcataagcagctatttattgactacttgctatatgttgtacactctgcaagaagacaggcatatattgatatataacacacagcccctgttgttaaggaggcatatcttcttgaaagagttaataccttaaagtcctgggtatggtcctgggtacatagtatatagtcaacacattttaattatgattttttggatctggaaactgatataaagatagcgacatataacagtaggtgataaattatgtttaaactaaaggtaactaattgtatttttcagaagaggggccttctctgtggtgggtagtcaagaaagatttcatgaactgcataagattcaaacaatgtctagaatattaaaactagtgtacaggatagggaattaggaaaagacaagtaacccaaggagaaagatgtcaagattaaaggaaaacatctgctgtgggcagggaataatggctaagattttcttttctgatgcagggaagtatatcgtttgttgtggcaggtgaaatgtcatcttgatattttaggggaaccaaattctaaaagggttttcatcatcggggccttatttgcaaatcgaactagataatggatcatgttctctgcaatggtttgtaaaacatttcaaaacattttacatattttttattatagaaattattgataaagactaaggtcacagtataaaaatcctttttagagcagacatttctgtagaagagtgaacatatgacctattatactctaatttggatatagataggatgtaacaaaggagtaatggaacaattcaaaggcagtggtatagtgcatagagtcctgttggggtcagaagacctgagccaagtttacccccaacatttataaccatgtaaccttaggcatattacttcatctcccttaatcttagttttcatatctgatcaatggaaatgatgaaacttattctgctggattaaatgtgataataaatattaatatgctgtatatatttaaatttttataaaatatattttataagcataaagtattcttacagaatttcattaggtttttaaaataatttcaacttttatttttgattcagggatttacatggttatattgcgtaatgctgaggtgtagggtacaatcgataccatcactcaggtagtgagcatagtacccaatagttagtttttcaacccttgctgctttctctctatcccctctctagtaatccccagggtctatttttgtcatctttatgtccatgtgtactccatgtttggatcctacttataaagtgagaactcatggtatttggctttctgttcctttgttaatttgcttaggataatggctactagctgcatctatgccattatgttctaaatttcagtttcctgcatgaaaattttgtcaagtactctattaaggtagaccacctctcccttttttttttttcaaacaagaagtagtttttcaccaaacaatgtctcttatgtaattcatcttcaatccactggatacccaataaacttgccccagaaaccttaaatctgtgcttacagagaggccagcttcccttcttgttaacccataggagattctgaattagggcaagcacaaaagatagcacaatagacatcctttgccttttcgtacagtgttcacatacagtaactcaactagtcttgtaagaatgctttgtgatagaccaggcagccttctttcccctatagaaatatatatatatttctttttataggtgaggaaactgaagcttgaataatttaaatgacttatatacattatcattgcttgttagccacagaccagagatttaagttcacatctccagaatccaacttaaatgttttctttgtcttaatactctacttctctaaagtgattatcaccaatgtaatgatatagagacacagcaagaccctttccttctcacctaatgtatagagcaatgcagagatagaatgatgggctataacaatcatataattgaaagaaagaacttcaaaaataatcaagttcagctgtttgacttataaatgtgataactaaaacctagagaggaaaagaggtactcaagatcacacagtaggagaggactgcagaaacaccaaacccaagctcttttgtccactcttccagcgttctttctactatactgcctatcctttatctagttaccaataaataacaaaagcttggaccacaatgcttttattgtctaggaaactcctgaagaagctaaataaaatgggtggggaatattgtaaatgtaattcaggctggattaagaaagaacttatttgtacattgtaactgacaagcacctgcaatgctgaaaggaatttttcattggcttgctgtttgctggctgcatcaaagccctgtctctaggacatgtctctgaacattgtgtgtagcatggctttcatttcttttaggataaaattcaaaaccctttatctggttggtaaacctctgcctaattgggaaccttctttctccacaactccatattgtacactccaatttcatctctgttctccaaccatggaagctatttgtcatgattcctccttgtgtcattttttttctgtcaaccttggggcttttgtgtttgctgttcacttcacctccttttattgttaacttctactcatctttcaattttcaacttaagtgttctcagagaaacctactttgattttcttggtccacaacggttctctggatgtgaactcttatagcacataattttcacttttttccacaaaactcgctcctatcacctgttacaagcatttacctctgataacaagaactttcaaatatctagctgtcatgtaagcacttttcataaacattaagagtatctgtgacacttatgtgtaatgtttcgtatctctgaaattgatatttaccagtcatttatcttggctaccaactaacaactatccatattatctgtaccaatcagatgtataatcacaattttgtgtgacagaaaatggctaaacttgatccaaggctattacatgctttatcaactgcacaatctttatatatgtcaattattgatctttaactgatttccttcttatggattttctcctctgcttatcatgtatgcctaacatgacaaaaaagagcctatcattgcagccagtatgataatactcagtctgtggggcttcttatttgcttattccatcatcatctgtcctgcttgatgtctttgcctatgcacaatcatatgacccatcacatctgtatgaagagctggatgactaggattaatattctattttaggttcttattcagcagaaatattagataatcaatgtctttttattcctgtaggtgtgaaatccagacaattgaagatggggcatatcagagcctaagccacctctctaccttaatattgacaggaaaccccatccagagtttagccctgggagccttttctggactatcaagtttacagaagctggtggctgtggagacaaatctagcatctctagagaacttccccattggacatctcaaaactttgaaagaacttaatgtggctcacaatcttatccaatctttcaaattacctgagtatttttctaatctgaccaatctagagcacttggacctttccagcaacaagattcaaagtatttattgcacagacttgcgggttctacatcaaatgcccctactcaatctctctttagacctgtccctgaaccctatgaactttatccaaccaggtgcatttaaagaaattaggcttcataagctgactttaagaaataattttgatagtttaaatgtaatgaaaacttgtattcaaggtctggctggtttagaagtccatcgtttggttctgggagaatttagaaatgaaggaaacttggaaaagtttgacaaatctgctctagagggcctgtgcaatttgaccattgaagaattccgattagcatacttagactactacctcgatgatattattgacttatttaattgtttgacaaatgtttcttcattttccctggtgagtgtgactattgaaagggtaaaagacttttcttataatttcggatggcaacatttagaattagttaactgtaaatttggacagtttcccacattgaaactcaaatctctcaaaaggcttactttcacttccaacaaaggtgggaatgctttttcagaagttgatctaccaagccttgagtttctagatctcagtagaaatggcttgagtttcaaaggttgctgttctcaaagtgattttgggacaaccagcctaaagtatttagatctgagcttcaatggtgttattaccatgagttcaaacttcttgggcttagaacaactagaacatctggatttccagcattccaatttgaaacaaatgagtgagttttcagtattcctatcactcagaaacctcatttaccttgacatttctcatactcacaccagagttgctttcaatggcatcttcaatggcttgtccagtctcgaagtcttgaaaatggctggcaattctttccaggaaaacttccttccagatatcttcacagagctgagaaacttgaccttcctggacctctctcagtgtcaactggagcagttgtctccaacagcatttaactcactctccagtcttcaggtactaaatatgagccacaacaacttcttttcattggatacgtttccttataagtgtctgaactccctccaggttcttgattacagtctcaatcacataatgacttccaaaaaacaggaactacagcattttccaagtagtctagctttcttaaatcttactcagaatgactttgcttgtacttgtgaacaccagagtttcctgcaatggatcaaggaccagaggcagctcttggtggaagttgaacgaatggaatgtgcaacaccttcagataagcagggcatgcctgtgctgagtttgaatatcacctgtcagatgaataagaccatcattggtgtgtcggtcctcagtgtgcttgtagtatctgttgtagcagttctggtctataagttctattttcacctgatgcttcttgctggctgcataaagtatggtagaggtgaaaacatctatgatgcctttgttatctactcaagccaggatgaggactgggtaaggaatgagctagtaaagaatttagaagaaggggtgcctccatttcagctctgccttcactacagagactttattcccggtgtggccattgctgccaacatcatccatgaaggtttccataaaagccgaaaggtgattgttgtggtgtcccagcacttcatccagagccgctggtgtatctttgaatatgagattgctcagacctggcagtttctgagcagtcgtgctggtatcatcttcattgtcctgcagaaggtggagaagaccctgctcaggcagcaggtggagctgtaccgccttctcagcaggaacacttacctggagtgggaggacagtgtcctggggcggcacatcttctggagacgactcagaaaagccctgctggatggtaaatcatggaatccagaaggaacagtgggtacaggatgcaattggcaggaagcaacatctatctgaagaggaaaaataaaaacctcctgaggcatttcttgcccagctgggtccaacacttgttcagttaataagtattaaatgctgccacatgtcaggccttatgctaagggtgagtaattccatggtgcactagatatgcagggctgctaatctcaaggagcttccagtgcagagggaataaatgctagactaaaatacagagtcttccaggtgggcatttcaaccaactcagtcaaggaacccatgacaaagaaagtcatttcaactcttacctcatcaagttgaataaagacagagaaaacagaaagagacattgttcttttcctgagtcttttgaatggaaattgtattatgttatagccatcataaaaccattttggtagttttgactgaactgggtgttcactttttcctttttgattgaatacaatttaaattctacttgatgactgcagtcgtcaaggggctcctgatgcaagatgccccttccattttaagtctgtctccttacagaggttaaagtctagtggctaattcctaaggaaacctgattaacacatgctcacaaccatcctggtcattctcgagcatgttctattttttaactaatcacccctgatatatttttatttttatatatccagttttcatttttttacgtcttgcctataagctaatatcataaataaggttgtttaagacgtgcttcaaatatccatattaaccactatttttcaaggaagtatggaaaagtacactctgtcactttgtcactcgatgtcattccaaagttattgcctactaagtaatgactgtcatgaaagcagcattgaaataatttgtttaaagggggcactcttttaaacgggaagaaaatttccgcttcctggtcttatcatggacaatttgggctagaggcaggaaggaagtgggatgacctcaggaggtcaccttttcttgattccagaaacatatgggctgataaacccggggtgacctcatgaaatgagttgcagcagaagtttatttttttcagaacaagtgatgtttgatggacctctgaatctctttagggagacacagatggctgggatccctcccctgtacccttctcactgccaggagaactacgtgtgaaggtattcaaggcagggagtatacattgctgtttcctgttgggcaatgctccttgaccacattttgggaagagtggatgttatcattgagaaaacaatgtgtctggaattaatggggttcttataaagaaggttcccagaaaagaatgttcatccagcctcctcagaaacagaacattcaagaaaaggacaatcaggatgtcatcagggaaatgaaaataaaaaccacaatgagatatcaccttataccaggtagaatggctactataaaaaaatgaagtgtcatcaaggatatagagaaattggaacccttcttcactgctggagggaatggaaaatggtgtagccgttatgaaaaacagtacggaggtttctcaaaaattaaaaatagaactgctatatgatccagcaatctcacttctgtatatatacccaaaataattgaaatcagaatttcaagaaaatatttacactcccatgttcattgtggcactcttcacaatcactgtttccaaagttatggaaacaacccaaatttccattgaaaaataaatggacaaagaaaatgtgcatatacgtacaatgggatattattcagcctaaaaaaagggggaatcctgttatttatgacaacatgaataaacccggaggccattatgctatgtaaaatgagcaagtaacagaaagacaaatactgcctgatttcatttatatgaggttctaaaatagtcaaactcatagaagcagagaatagaacagtggttcctagggaaaaggaggaagggagaaatgaggaaatagggagttgtctaattggtataaaattatagtatgcaagatgaattagctctaaagatcagctgtatagcagagttcgtataatgaacaatactgtattatgcacttaacattttgttaagagggtacctctcatgttaagtgttcttaccatatacatatacacaaggaagcttttggaggtgatggatatatttattaccttgattgtggtgatggtttgacaggtatgtgactatgtctaaactcatcaaattgtatacattaaatatatgcagttttataatatcaattatgtctgaatgaagctataaaaaagaaaagacaacaaaattcagttgtcaaaactggaaatatgaccacagtcagaagtgtttgttactgagtgtttcagagtgtgtttggtttgagcaggtctagggtgattgaacatccctgggtgtgtttccatgtctcatgtactagtgaaagtagatgtgtgcatttgtgcacatatccctatgtatccctatcagggctgtgtgtatttgaaagtgtgtgtgtccgcatgatcatatctgtatagaagagagtgtgattatatttcttgaagaatacatccatttgaaatggatgtctatggctgtttgagatgagttctctactcttgtgcttgtacagtagtctccccttatcccttatgcttggtggatacgttcttagaccccaagtggatctctgagaccgcagatggtaccaaacctcatatatgcaatattttttcctatacataaatacctaagataaagttcatcttctgaattaggcacagtaagagattaacaataactaacaataaaattgaatagttataataatatattgtaataaaagttatgtgaatgtgatctctttctttctctctctcaaaatatcttactgtactgtactcacctattttcagaccataactgaccatgaaacctgggaaagtgaaactgtggataagtgaggaactaacatacatacatgattgtttatctacagatgtatgcctcagtttcttagtatgcttgaaaatgtatgattttgtgtatatccgtgctacatgtaagtgtggttctattcatatttgaatatgaattctgcataagtgtgtttattcaagcaaatgtacaaggctctgagaaggaagatcaacatacaacttggaatatttcaaggccgaaatattcaaggctgacattggcctccttcctatcagttccctctcccagatggaaattctagaaatggcaggtgaggtggacaagcagggaaagaaattatatgcatagaacagaaggagaagaaagagtaaagtcaggcctcagccagcctctttttagctctttaaatcctctggatttaagagggataaagggtggaataaggataaattaatgccaattgtaatgccttaaatttgtgtgataccttacaacttgaaacatattcacaaaactatatatttgaatatctcattagctgagtaaggtagcaaatcataattaactttttccattttattgatgggaaagctgaagttcaatgaagtaaatttttcaatagcccacagagtaggaaagtgacaaaacctgagcctgggcctccaggtcactcaaggacactttctttcttccacacccaattgcttcatgcttaaagttggcaaaacaggaagtgaaactcctgcagttttctgtgtggttgacactagcaagggtttctcagttgaagccatgaatcattaagccaatacatatgcatatatgttatacataccaaatgatttatttataaccctatctttccataaaggacttgaaggagcttcaaacaaaggatatgtgaacaatagggttaatcaataataagtagaaaatctggacatagaataaaaagaggagagaaagacaccgagaatgagcgttaatacagtgctttccatttttctggtgttttgagtagcgtggcttttggagaaagccaaaactcaaattcactccttatcaactgtgtgccttgggctccatttctctgagagtctacttagctccaatgtaaaataagaatagaactatgactttgtaaggttgctctaaggattgaaaatcatgtattatgttcaatacggggacactgtccttatgggtgagtactcccctaagactttattaagagggcactaggagaagcactgggaggtcttctcagtaacaacactaaagtaattgctatttttccagcctgtggaaccacagaagtgactgtaactaaaattagacatttctttctgattcattctctactcacgggattgtcagaccccagtcttcttctggactctataaactttttagaaatcatcagcaggctcctggagaagcttaaatgaactcacacaatatgtgacagtgaactccctgggagagtgaaaaccaaagtctaagccagtgtctccatttacttgtgtgattgtgggcaagtcattcaagtgctttgaggctcaggtcttaattcatga

SEQ ID NO: 369 - DNA, 1869 bp, Homo sapiens
ctggcaccggaggctggaggggatccccgagcccgggatcgatgatccgagccgcgccgccgccgctgttcctgctgctgctgctgctgctgctagtgtcctgggcgtcccgaggcgaggcagcccccgaccaggacgagatccagcgcctccccgggctggccaagcagccgtctttccgccagtactccggctacctcaaaggctccggctccaagcacctccactactggtttgtggagtcccagaaggatcccgagaacagccctgtggtgctttggctcaatgggggtcccggctgcagctcactagatgggctcctcacagagcatggccccttcctggtccagccagatggtgtcaccctggagtacaacccctattcttggaatctgattgccaatgtgttatacctggagtccccagctggggtgggcttctcctactccgatgacaagttttatgcaactaatgacactgaggtcgcccagagcaattttgaggcccttcaagatttcttccgcctctttccggagtacaagaacaacaaacttttcctgaccggggagagctatgctggcatctacatccccaccctggccgtgctggtcatgcaggatcccagcatgaaccttcaggggctggctgtgggcaatggactctcctcctatgagcagaatgacaactccctggtctactttgcctactaccatggccttctggggaacaggctttggtcttctctccagacccactgctgctctcaaaacaagtgtaacttctatgacaacaaagacctggaatgcgtgaccaatcttcaggaagtggcccgcatcgtgggcaactctggcctcaacatctacaatctctatgccccgtgtgctggaggggtgcccagccattttaggtatgagaaggacactgttgtggtccaggatttgggcaacatcttcactcgcctgccactcaagcggatgtggcatcaggcactgctgcgctcaggggataaagtgcgcatggaccccccctgcaccaacacaacagctgcttccacctacctcaacaacccgtacgtgcggaaggccctcaacatcccggagcagctgccacaatgggacatgtgcaactttctggtaaacttacagtaccgccgtctctaccgaagcatgaactcccagtatctgaagctgcttagctcacagaaataccagatcctattatataatggagatgtagacatggcctgcaatttcatgggggatgagtggtttgtggattccctcaaccagaagatggaggtgcagcgccggccctggttagtgaagtacggggacagcggggagcagattgccggcttcgtgaaggagttctcccacatcgcctttctcacgatcaagggcgccggccacatggttcccaccgacaagcccctcgctgccttcaccatgttctcccgcttcctgaacaagcagccatactgatgaccacagcaaccagctccacggcctgatgcagcccctcccagcctctcccgctaggagagtcctcttctaagcaaagtgcccctgcaggccgggttctgccgccaggactgcccccttcccagagccctgtacatcccagactgggcccagggtctcccatagacagcctgggggcaagttagcactttattcccgcagcagttcctgaatggggtggcctggccccttctctgcttaaagaatgccctttatgatgcactgattccatcccaggaacccaacagagctcaggacagcccacagggaggtggtggacggactgtaattgatagattgattatggaattaaattgggtacagcttcaaaaaaaaaaaaaaaaaaaaa

SEQ ID NO: 370 - DNA, 924 bp, Homo sapiens
atggcggagatcagcgacctggaccggcagatcgagcagctgcgtcgctgcgagctcatcaaggagagcgaagtcaaggccctgtgcgctaaggccagagagatcttggtagaggagagcaacgtgcagagggtggactcgccagtcacagtgtgcggcgacatccatggacaattctatgacctcaaagagctgttcagagtaggtggcgacgtccctgagaccaactacctcttcatgggggactttgtggaccgtggcttctatagcgtcgaaacgttcctcctgctgctggcacttaaggttcgctatcctgatcgcatcacactgatccggggcaaccatgagagtcgccagatcacgcaggtctatggcttctacgatgagtgcctgcgcaagtacggctcggtgactgtgtggcgctactgcactgagatctttgactacctcagcctgtcagccatcatcgatggcaagatcttctgcgtgcacgggggcctctccccctccatccagaccctgaatcagattcggacaatcgaccgaaagcaagaggtgcctcatgatgggcccatgtgtgacctcctctggtctgacccagaagacaccacaggctggggcgtgagcccccgaggagccggctacctatttggcagtgacgtggtggcccagttcaacgcagccaatgacattgacatgatctgccgtgcccaccaactggtgatggaaggttacaagtggcacttcaatgagacggtgctcactgtgtggtcggcacccaactactgctaccgctgtgggaatgtggcagccatcttggagctggacgagcatctccagaaagatttcatcatctttgaggctgctccccaagagacacggggcatcccctccaagaagcccgtggccgactacttcctgtag

SEQ ID NO: 371 - DNA, 2612 bp, Homo sapiens
cggacgcgtgggtccggacgcgtggggcaaagtaaaggaagataaatttaaaggaagtctctcagaaggaatgaaagttgagcaagagtcttcatctgatgataaccttgaagattttgatgtggaggaggaagatgaagaggctctaatagaacagagaagaatacagaggcaagcaattgtgcagaaatataaatatcttgctgaagatagcaatatatctgtgccatctgagccaagcagcccccagagcagcacaagatcacgatctccttcgccagacgacatcttggagcgagttgctgctgatgtaaaagaatatgagcgggagaatgttgacacctttgaggcctcagtaaaagccaagcataatctaatgacagttgaacagaataatggctcatctcagaagaagattttggcacctgacatgtttacagaatctgatgacatgtttgctgcttattttgatagtgctcgtctccgagctgctggcattgggaaagatttcaaagaaaatcccaacctcagagataattggacagatgcagaaggctattaccgtgtgaacatcggggaagtcctagataaacgttataatgtgtatggctacactgggcagggtgtgttcagcaatgttgtgcgtgccagggataatgcgagagccaaccaggaagtggctgtaaagatcatcaggaacaatgaactcatgcaaaagactggtttaaaagagctagaattcttgaaaaaacttaatgatgctgatcctgatgacaagttccattgcctgcgcctcttcagacacttttaccacaaacagcacctctgtctcgtctttgaacctctcagtatgaatttgcgagaggtattaaaaaaatatggtaaggatgtcggtctccatattaaggctgtacgatcgtacagtcagcagttgttcctggcattgaaactccttaaaagatgtaatatcttacatgcagatatcaaaccggataatattctggttaatgaatccaaaacaattttaaaactttgtgattttggatcggcctcacatgttgcagataatgacattacgccttatcttgtcagtagattttatcgtgctccggagatcacagctgcacgagttagcgagctcatcctcctcctcaggtggcatgaaggtagttgtgacaggagtcttggtcatgtcgagcaagagtagcaaacagttgtggaaaccctcgactttagaagactgctcttggttgttcaagttataggtaaaagctatgactacggtatcgatatgtggtctgtaggttgtaccttatatgaactctacactggaaaaatcttattccctggcaaaactaataaccatatgttgaagctcgccatggaccttaaaggaaaaatgccaaataagatgatccggaaaggtgtattcaaagatcaacattttgaccaaaatctgaacttcatgtacatagaggttgataaagtgacagagagggagaaagttactgtcatgagcaccattaatccaactaaggacctgttggctgacttgattgggtgccagcgacttcctgaagatcaacgtaaaaaagtacaccagctaaaggacttgttggaccagatcctaatgttggacccagctaagcgaattagcatcaaccaggccctgcagcatgcattcatccaggaaaaaatttaaatgagatgaagaaactccaagggtttgagtaattaaatacaaagactgaagaaatttcacagcagtttattattaatgtatataaacttataaatatttctgcagcaaatttgaggaagcatgatatatttgaattaacaccgagggtgatatttcttttagaaatgttagttaatctgttttgtgtcttatgtgaaatttcactgtagaaatgttttaattgccaagactgcacagaattacagtgctaatgtatatggttgcagttcacataaaagacaaaagcgtctgttatgagtggcagtgctgggtggttgatttgtttttagcagacttggcttcagtttgctcttcagatacaatggccagcataaatgctgtttatattcacgttttcctaggtgtgtgtgtgcaggccacagcagcatgcccttggtgtagtcagtgccgaagggagtctgttccttcttgagcctgcctgcagggatgtctcctcttttaaagcaggttgtgtacaacattcagtacactgaaggcataaaccttccactcttgaacaaagcagctgctttttaaaagcgagaaaaaggaaaacggggcacaggccattcgacgccttctccaaggggtctgatttgctgagacaccagcttcaccttcttaacaaggtgcagatcactggaagatgacggcagccagaagacatgagccaagggtaagggactgttcttctgaagagccattccatttagtgatcaagatacggaagctgacctaagaaaatgttgtgtattctaattgttcttgataccatttgagttgtaacttacgttgtagcagcaaatgatcccaaactacttaataggaagcttaataaagtgtgcctcttgctaccaaaaaaaaaaaaaaa

SEQ ID NO: 372 - DNA, 2308 bp, Homo sapiens
ttcaggtgccagccagctgaaggatggccacccctgtggtcaccaagacagcctggaagttgcaagagatcgtcgcgcatgccagcaacgtgtcctcactggtgctgggcaaagcctccgggcggctgctggctacaggcggggatgactgccgcgtcaacctgtggtccatcaacaagcccaactgcatcatgagcctgacgggccacacatccccagtggagagcgtccgcctcaacacccccgaggagctcatcgtggccggctctcagtcgggctccatccgtgtctgggacctggaagctgccaaaattcttcgcacactcatgggacacaaagccaacatctgcagcctggatttccacccgtacggcgagtttgtagcctctggttcccaggacacaaacatcaagctctgggacatcaggaggaaaggctgtgtcttccgatacagggggcacagccaggccgtgcggtgtctccggttcagccccgatgggaagtggttggcgtcggccgcagatgaccacaccgtgaagctctgggatctcactgccggcaagatgatgtctgagttccctggtcacacggggcctgtcaacgtggtcgagtttcaccccaacgagtacctcctggcctccggcagctctgacaggacaatccgcttctgggacctggagaagttccaggtggtgagctgcatcgaaggggagcctgggcccgtcaggagcgtcctcttcaacccagatggctgctgcctgtacagcggctgccaggactcactgcgtgtctacggctgggaacctgagcggtgctttgatgtggtcctcgtcaactggggcaaggtggccgacctggccatctgcaatgaccagttgataggtgtggccttctcccagagcaacgtctcctcctacgtggtggatctgacgcgtgtcaccaggactggcacggtggcccgggaccctgtgcaggaccaccggcccctggcacagccactgcccaaccccagcgcccccctccggcgcatctatgagcggcccagcacaacctgcagcaagcctcagagggtgaagcagaactcagagagcgagcgccgcagccccagcagcgaggatgaccgggacgagcgcgagtcccgcgcggagatccagaacgccgaggactacaacgagatcttccagcccaagaacagcatcagtcggacgccaccccggagaagtgagcccttccctgcacccccagaggacgacgcagccacagcaaaggaggcagcaaagcccagccctgccatggatgtgcagttcccggtgccaaatctggaggtcctgccccggcccccagtggttgcttccacacctgcacccaaggctgagcctgccatcatccctgccacccggaacgagcccatcgggctgaaggcctccgacttcctgcccgccgtgaagatcccccagcaggccgagctggtggacgaggatgccatgtcacagatccgcaaaggccacgacaccatgtgtgtggtgctcaccagccgccacaagaacctggacactgtgcgggctgtgtggaccatgggcgacatcaagacgtcggtggactccgctgtggccatcaacgacctgtcggtggtggtggacctcctgaacatcgtcaaccagaaagcctccctgtggaagctggacctgtgcaccaccgtcctgccacagattgagaagcttctgcagagcaagtatgagagctacgtccagacgggctgcacctccctgaagctgatcctgcagcggtttctgcccctcatcacagacatgctggcggccccaccctctgtgggtgtggatatcagcagggaggagaggctgcataagtgccggctctgctacaagcagcttaagagcatcagcggcctggtcaagagcaagtcaggcctgagcggccgccatggcagtaccttccgcgagctgcacctgctcatggccagtctggactgaggaaagcagtgggcaggggcgctcggcagcccacagggcctggcctcagcccccactcctgttccttgtgcacccactggcccatgagcctctgcctggcccctgctgctgtcctgtggccgtcctggaggaggtgatgctggtccctggccacctctacagccctgaactcttgagacaactctctccagcaatagctgcccagctttgcccaactgttgcttcttggggcagcgaactgagccctggggctgctgctgtaatttataaggcaaattttattaaatttgtaactattaaaaaaaaaaaaaaaaaaa

SEQ ID NO: 373 - DNA, 2398 bp, Homo sapiens
aaaggacggggccttgggcgcctctgagatgctcccaagtgccagggagggccgagcgaggcgcaggcaaccgggcagcaggcatgatgccctcgcctagtgactccagccgctcgctgaccagccggcccagcaccaggggccttacccacctccgcctccaccgaccctggctgcaggccctgcttacgctggggctggtccaagtgctcctgggcatcctggtggtcaccttcagcatggtggcctcttccgtcaccaccaccgagagcatcaagaggtcctgcccgtcttgggctgggttctcgaacctgctcttcagcgtctgtgggctcaccatttgtgccgctataatctgtacactctctgctattgtctgctgcatccaaatcttctccctggacctcgtgcatacgctggcccctgagcggtcagtctcaggcccactgggacctctgggctgcacgtccccgcccccagcccctctcctacacaccatgctggacctggaggaatttgtcccgcctgtgcccccaccgccctactatcccccagagtatacctgcagctcagaaacagatgcacagagcatcacgtacaatggctccatggacagcccagtgcccttgtaccctaccgattgccccccttcttatgaggcagtcatgggactacgaggagacagccaggccactctctttgaccctcagcttcacgatggctcgtgcatctgtgaacgagtggcctccattgtagacgtgtccatggacagcgggtctctggtgctgtcagccattggtgacctccctgggggctctagcccgtcggaggactcgtgcctgctggagctgcagggctccgtgcgctccgtggactacgttctctttcgctccatccagcgcagccgtgccggctactgcctcagcctggactgtggcctgcggggccccttcgaggaaagccccctgccacggcgccccccacgggctgcccgctcctattcctgctctgcccctgaagctccacccccactgggtgcccccacagctgcccgcagctgccaccggttggagggctggccgccctgggtgggaccctgcttccccgagctgaggcggcgggtcccccggggagggggccgcccagccgcagccccgcccacccgagccccgactcgtcgcttcagcgatagctcaggttccctcaccccaccggggcaccggcctcctcatccggcatccccaccaccgctgctgctgccacggtcccacagcgacccaggcatcacgacctccagtgacactgctgacttcagggacctttataccaaagtgcttgaggaagaagctgcttctgtttcctctgcagatacagggctctgctctgaagcctgcctcttccgcctagcccgctgcccttcccccaagttgctacgtgcccggtcagccgagaaacggcgccctgtgcccaccttccaaaaagttcccctgccctcgggccctgcacctgcccactccctgggggacctaaagggcagctggccaggtcggggcctggtcactcgtttcctccagatatccaggaaagccccagaccccagtgggactggagctcatggacataagcaggtgccccggagcctgtggggccggcctggccgagagagcctccaccttcgcagctgcggagatctgagctctagctcttccctgcggcgtctcctgtctggccgcaggctggagcgtggtacccgcccccacagcctcagcctcaacgggggcagccgggagactgggctctgacctaggcttcttgtcacactgaacacatccagccacaggcaccagctggttgggaccagcagcccccagcatcctcttgcactggctggcacaaaaagaaacctgctgtataccccccaaagtgtccctttccctcctacctctggggtctcttgctgcttgcctctgctgctctggactgggagagcttctgtcctgtgctgcatgggtatttagactgtgggggagatgccccttcttatagcactggaggaggaaaacaaattcttgtccccctcagaatgagagtggctctttctgatttgcaagggcactatggtcagggcaaaggcatggcccaggtgtttaagtacagggtgacgtgtgcctatgcaatggggtggtaaggcaggcacgaagagtccaaaaaatctaggtggcctctcagctctgccacctctagctgcatgaccttgggcaagctatgtaaccccaattgcctgctccattaaagactgtgaaggtagaatgtttgtaaagctcttaacagtatgtaagccttcaataaatttcagttttccccttgttttcttgatcaaaaaaaaaaaaaaaaaaaa

SEQ ID NO: 374 - DNA, 31737 bp, Homo sapiens
gaattctgactcatgagtactagcttctcgatatgcactgggtgagcacatggcatctctctaacccaggctggaagggccaggtcagcaaattagggctgcaggcatctgtgatgtggtggcaggaggtaacatgcagccaagacccggggccgccttgtctagccacgtgatctcagagatgttactcaatatctctaagccttggtttctgtggctataaaatggtgatgacatatatgttccaggtttgttgaaaggattaagaggggtactttacatgaaagccctttgtaagttgcagtgtggtgttcaaatgatgcagcttgagtttttgagttgaaagggacttgagacaagcaagaagatcgtatagtatcagtaggtcgcctgtcgagaggctgagaacccaggctgtcagtggggccctgacctcacagaggagccatcctgccctgccaaacacagggaagtgcccccaggattcaaggaactgctcgccagcaacagagacctcttcctaagaccttctgattttcattcccctgctttacccagcttctaggagaaatatctttctatgaaaagaaaatgtgtgccagctgcatatccctttctccttctcatcccctgcccctcccaccatagaaaattaaacttttattttgttttgttttttagacatgggggtcttgctatgttgcccaggctggactcaaactcttgggcccaggtgatcgatcctccttgtctcagacttctaagtagttgggattacaggcgtgagccactgtgcccacataaaactttagagaactgccttttttgttctctagagcatgtgctgggcaggtgtgtgcagtgggtgaggaagagggttgggaaggcagaaagcagcaggaagctaggattgtcctgtaggtggggcttcagctgctggagtggaccggaaatctgccttctccaggggctttctggagccttccctctgccttggtcctgagaacacctggaaattcctcgtttaggagttgagaaaactgaggaagaggagaagatgcccctagtttgatggctgccttcgcctgctagcagtggaaatggtcagagggtggacctgctcgagccgacttgctggcctgttgccacgttgtcaccggctgcggaaggagaacgagtcacagctccctccccctacctgaccctcactctgctccctgggaaccagactaccagactgcctactgctgtggccagtggcttctgtccctcggaacactgtggccctcaagttccctgatgtctgctccttctctggtctgtggttctgccaaggctggtggctcatgtctcttttaaaagagaagttgtctttggaagaggaagggaaacgtgacagagtcccctgggagcccaggtcctgaagatgatgttgcttctgatattgtgcaatgattactggagtgtctagaatactaataatgatgaacactaataatcgttagcatttattgagcatggctggctgcttgtcttttttcctgccaagcttcattgaactaactgtgtacctagtcctgggtcaggcatggctgaagggaagtaagatgtggtcttactagtctttgagaccaagtattacccttctcagagacaagtgttgttattactgtttttttttttttttagacagggtctccctctgtcacccaggctggagtgcaatggtgcaatcatggctcactgccactttgacctcccggctcaagcaatcctcctgcctcagctttctcagtagctgggactacaggtgggcaccagcacgcctgactaatttttgtattttttgtagaggcagggtcttgctatgttgcccaagctggtcttgaactcctgggctcaagtgatctgcccacctcagcctccaaaagtgctgggactacaagtgtgagcccccacacccagccttattattattattattattattattattattattttgagatggagtttcgctctttttgcccagctggagtgcaatggtgtgatctcagctcaccacaacctccgcctcctggattcaagcgattctcctgcctcagcctcccgagtagctgggattacaggcatgcaccaccatgcacggctaatgttgtatttttagtagagatggggtttctccatgttggtcaggctggtctcaaactcctgagatcaggtgatctgcccacctcggcctcccaaagtgctgggattacaggtgtgagccaccacgcccggcccagccttattgttattacctttttataggtgaggaaaatggagcacatggaggctaagtaacttgcctgaggtcgcagagcaaaatagtggcggaatctagattggagcccaggtagtctggccctgtcatatcctatgtgggctgtgacatgcggaacagggctgtcagccacagggttcaggaggggatggaatactaaaggttgacaattcatcagatttgggtaagaaactggatttctcttctcaggttgtttctgagatgcctgggactaaattatagaaaccatttggtaggatgggaatagaaacttacagaattctcagagttcttagcctggcctggttggcagtggtgagaagtgtgtttggggtttgctcagagctcatgggtagtagttgccctttttgctttgttaagaatctttccagaagcagctccctgctaaaaattctgtctcagatgctcatattttcaaaatttccctattctgcctggacttagcaatattttgggattttcccccgaatcctgtgatagttggctaactgatcaaaatcttggatcctttgactctttttggcccacgttggtgatgctgaggtggtggtggggatgatgatggtggtggcgatgttgaaagggtggagaagaatgtgatgacagttatttctacctttcactaaatatctgcacttcaattcctgacctcactttatcctcacaacagctgtgtgggggaaagaatgcccagttcacagacgagaatactgaggctcaaagggtttgtgtaaaggcagtaagaagtagagtaagaattcaaactcagatctacgcaacttcagagcctgggagctcaccaccatgccattataaaattgtgttcctgagatgatggtgaaggttgcatatccccagcaaactgctagaacatgttattcaccagagagctgtgagcacataagaaggaagtggtgatcacccggtgccagtgctggtgtgctacaaacatcatagaccagcttgtctggtttccccttttgatgaggttccttagctggtggaccaggagcacagctggagttgtgatttcaacatgctttacatagacacagctttatgtattatacatatgattaaaaattatggcggaagttttaaaatgaaaaccaattcacccacctctgccaacaaatcacttttcacgcctctttcccctccttgctgtctatggttcaatgtgtctagttggttgttgtgcacacaccacttgtatcctggacaaggtgttttattggcctcctgtctgctgggtgtggagccctgggtgttggaggatcgaagttctggtaggcttgtgtctgattgaaaggctgtgcctaagggggggtctgttcttgaatccacgtcactttgggtggtgacctcaggctgctcgtcaccccttcctgggttctgtgccatttcttatttagtaacagctcagatgaggacttggggcatttgcctaccagctccacagatgacaccagctgggagggaaaggctgataccttgtatgacttgattatgagtcagagcatctggacagactgtctgataggctgcgctgagcagaatgcatccgtctgggtcaggagtcagtgctttgctcactgaaccacctccctcaaccatggagcagaaaccacgagacccagagttctgagttgacagtgagcccaggagagatcaggcatggaagtgtgactgcccaaagtcgaagtgtgctttcttccccctatgtttttatttggttataccttttaaagttattattaaaagtctaatatatacatatttaaagaaaacttagccaactcagataagtagtaagaatttaaaaatgaggccgggtgcggtggttcatgcctgtaatcccagcactttgagaggccagggccgatggatcacttgaggtcaggagttcaagactagcctggccaacatggtgaaaccccatctccactaaaaatccaaaaattagccaggcatggcggtgggcacctgtaatcctagctactcaggagactgagagaggagaatcacttgaacctgggaggtggaggttgcagtgagccgagatcgtgccattgcactccagcctgggtgacagagcgagactctgtctcaaaaaaaattttttttaataaaaatgacacaaatacccctacaaagacattttaacaatttggtattgcctatgcatgttttctaaaaaaatttttttcctcattaccacatttaggaagcttttctttttgaagtcacacaatatagaaatgtacagtgtaaaatgtgaaacttctgaaattccctctcccagattttagagcctctataaatagttttgtttatattctcccacaagtcttgtgtgtgtgttctgctgtttgtgtgcacacctattctcctccaaatggaatcatcactaattccactctgcagtaaagatatgattttattaatgaacttatcaaacatttattagatatcatacctcatgctagatttgtggagcaagacagacccccttccctcccctatcacaggagtctgggagggaggtgttggagagggatctcccagaattactccaaggagatgcctgagctgaatttcgaagggcaggagtgactattttttttttttctgagatagggtcttgctctgtcgcctaggctggagtgcagtggcgcgatctcggctcactgcaacctctgcctcccgggtttgagcaattctcctgcctcagccttccaagcagctggaattacaggtgtgcgccactgcgccaggctaatttttgtatttttagtagagatggcggtttcaccatatgggccaggctggtcttgaatcctggcctcgagtggtctacctgccttgaactcccaaagtgctgggattgcaggcatgagccaccgtgcccagcctatttttttcatttaacattctatcttagatagcttttccatgtcattatctactttttgaaaaacgatttttgattgccttataagctttcatcgagggaacatatcattctttccatcttcttattttaatcgttttattgtttgggtgtgttacttgaatgcatcattggacaattaatagaaaaagagcaaacagaatgaggaaggtaattggcaagcagaccctgtggaggccacgctagtcagacctcttgtgggttatgctggtgaattctggaaacggtgtcttcaagggaagatgactaagggtgagatggaaccagatggccagggtttagaaaacattttgtttgaatgatcagaggagttgagcatgtttagccagaggaggtgcagactgagagagcacacgagcaccgatgtagagcttccactggagcgtctcctgagtggggaaactaggctggttctgttgcagtgctaattagtgcagaggtgattgcagtgctgatcacacttggtggaaggaagagcttcctaatactcgtactaaggaaaatgctatttcttccaaaaggatggtctcgcgaggatgagaggtgggtgacatgccctgcagaatctgtctcggctctgagaatccaatttcaagggtagatccagcagttctcccctcgcttgtatcctattcccccaggatagagtctggttctaatagaggacacagacttcctggtgccctcccctgggggtggggcccctctgtttgcatagttggtcctttccccaaaacaggtgctcagatttgtagccatggaagcgtgttttagaacttacccagttctagaggctgcaggcaggcttgggtttttcccactagcttctgcagatccctgggtccaccaagtcagaaacagactgtggcacctccatgccatgaaatatgactcagcactgaaaaggaacaagctgatggatgcaacaacttgaaagacctccagggaattttgtgcagttaaaaaaaaagccaacagtcccatacataccatattatttatttatataatataatgggttttttttttttttttttttttgagacagagtcctgctctgtcccaggctggagtacagcggtgtgatctgggctcactgcaacctccgcctccctggttcaagcgattctcctgcctcagcctcccgagtagctgggactacaggtgtgtgccaccacacccagctaatttttgtatttttagtagagacagggtttcgccatgttggccagactggtcttgaaatcctgacctcaggtgatccacccgccttggccttccaaagtgctgggattacaggcatgagccaccacgcctggcctatataacataatttttgaaatgacaccatgttagtagtagaggacagattagcgattgtggagctgaaggggtgggggacaggagggaggtggctgtggttacagaaggccatgggcatcctcgtgttggagctgttcagaatgttgactgtgatgccagagacaggggactacgctagcgatgacatagatggaacttaatacttaacgtgagtagcggtgaaacgggaagtctgaataagatccgcggatgatactgctgttgtggtattatgatacagttttatgaggtgtgactattgggagaaactgggcaaggatctcagtatgatttcctacaactgtatgggaatctacaagtatctccataaaaatgtcagtaatgaaaggcacactagctcgtgaaatcagaatgtggatttaataaaaagtcaagaaaacgaatgaaaagaagttactaggtgctggctgcacctcttgtttctcttgtcgggttttgggggatctgcctgtttgtgctgctgcaggcagatgcttctgctctgagtccggtgacttggggcaggaggaaggtggggcagctgggccgggaagtaggtctttggcacataaggagagggctggtgcaaactaaatgggatcgaagaggcagagatggaattttccggctagaattggcaaaagaggttatgtcctggtgtgtgtgttttgggggcgacacactgaactgaggaccaggagagatccggcaaagtcgaactttaaatggggcctgaggacagtgggtggccaggccaggtctgaccccagagagcctgggggactgtcagcagagccctgaggtgtggactgagtattttttccccttcttggttgagggcacttggcaactggcagattattccagcctgccctggggaggctgcctaagtctggctatggggagagaagaccttccatcaacccatcaattagtcaatcaagtgctaactctgggcaaggttgagggtggagggggagggagagaggcagtaggaagaggaaaccggggcactgtgaccagccaggacttcctggtccacccagcatggtgcaggttggggaagaggtgaggccccagggagaaagtacggtggcttgttgtggtcccgggaggattcctggcaaggctcagctttggcctgtgtgctggagggcaggcaggttcggtaggcggtaggggagcccagccattccgagcaggcagatgggttcctaaccgagaggttaggaacctcttggttcctaacaggcttgggggcctttctggctagagccaacgtcagagttgagggagccagtgcccttagaccaatgttaaaggagtgacgacccatatacagtggtgggcacagcaggggcccgtctcttgggcccaagaagtgggttttgtagtagatagagttttgcagagtgttccttttttttttgtttttgaaatcaacactgtatttattgatttagactactttattgaggtatgattgatatgcaaaaagctgtacctttttgtgacattacagacaggggcctgtgctagcaatgacatagaatggaacttaatattcacatgagtagcagtgaaacgggaaatctgaataagatccacagatgatactgctgttgtgcttatcacgaatgacagcaagatagtgtcaattaagacagccatttcaagctactgacatcctgctcttttctcttgttttttgtttcttttgtttctatttaatgtgtacaacctgatgagtgtggatgtatggaaacaccagtgataccatcccataagttaggctgcaaaatatccatcaccttccaaagtttcctcctgccctctttatctattattctatttatttataataataattactattttgtgataagaacacttaatacaagatctcttattgaaggtatggaccaccttttgtgtatccattcatttgctaaggaaaatgcttagtttgttcccacatcttggcttctgtgaacagtgctgcagtgagcataggatgcagctctctcttcagatcctggtttcaattccttcctttggataaatactcagaagtgggctcgctggatctgcagagcatgatctctctgggcttcagttcgcttttctgcaatattgggggggtctcttgagtggtgcaagatcaaagataaccaggtccccgcacgtttgtgtctttccacaaggtcagacttttattgatgcaatttcaatcataaacaccactagccacatggagttcccaaaaagacaattctccttagtacttcctgttcactcaggaggcagagcctcgggcacacaggctgaagccactccacaagtcagtcaacattgcaagccatacataatcatatacttaatatataaatgtatagattaaacatcccacatcaaagtaacatttatcatcaagagaaaggggttaggaaaaagggttaatgaaccagtccagggagagccacgaagacaacaagaccctcctgccctggcctgggcagtctgtcggtttcgtggggaagagtttctgatgttggcagaggcttcgctggcagatgctaggtgcttatcatgagtgacagcaagatagtgtcaattaagacagccatttcaagctgctgaagtcttgctcttttctcttgttttgtttttttgtttcttttggttgcttttttttttgagacagggtctcgctctgttgcccaagctggagtgcagtggcgtgatcacagctcactgcagccttgacatcccaggctcaagtgatcctcccacctcagcccgctgagtagctgtgccaccatgctaagctaatttttttaaaaaatttttgtagagatgggggtctctctgcattgcccaggcttgtctcaaactccagggctcaagcaatcctcccacctcagcctgccaaagtgctgggattccaggcatgagccactgtgcctggctgtcttcttttttttttttttttttttttttgagacagagtctcagtctgccacccaggctggagtgcagtggtgcgatctcggctcactgcaagctctgcctcccaggttcacgcctttctcctgcctcagcctccccagtagctgggactacaggtgcccaccaccatacccggctaattttttgtatttttagtagagacggggtttcaccgtgttagccaggatggtcttgatctcctaatctcgtgatccgcccgcctcagcctcccaaagtgctgggactacaggcgtgaaccaccgcgcccggccattgctgtcctcttcctatggccacagagtcctctactgaggacagacagtggaggagtgtgtatgtccttgtctggctggatgccgtgtttatttatttgcaaaacatcttgtccctgttgacaaagtgaaacataagatgaggtctttttctaggatggagttatttatgtcaagggtgctgtgtacgagcctcacgcatctgcagtgggaccctataggagggcaaagaaccagcttcagtgaggactgcctgacacaactctcttctttcctttctggggagctggtgcaggggagggtgtggcgtcaccacgcgagtggtcaggactgagagccctgagctgctggggcaaatacttttctctgtgcctcagttttccccctcttaaaagtgggttaataaccacttacggccttccaaatagaacataattagctaattcctgctaatgactgaggcctacctactgtctctctttgattttaatttctccacccactgtttatccatctgccaaaagccaggcagcccaattcctccctctggtctggtggagcagctgaagttcagattcaaacttcaaaacaaactgaaaggctgggcgcggtggctcatgcctgtaatcccagtactttgggaggccgaggagagcagatcacctgaggtcaggagtcgagaccagcctggccaaatggcgaaatcctgtctctgctaaaaatacaaaaattagccaggtgtggtggcgggcgcctgtagtcccagctactcgggaggctgaggcaggagaatcactagaacctgggaggcggaggttgtggtgagctaagatggtgccactgcactccagactgcgtgacagagcgagactctgtctcaaaaaaaaaaaaaaaatcaaacaccctccaacaaaaaaaatgaaagaccttaacagcacaagtctgtagtgtgggccttagtgaggagcgacctggcaggtctttccaggatcccaggagccaatccttggctggcccacatctacccgcccttgtcactctgtcccgacccatggctccaggagggctctgctgctgtcccgcttctctgtaacccctctgtccactttctctgggagagagcagaaggccagccagggtgtccctacccacttgcacccatgggtggtttaccccacaagaccagagagtgctggccaggtcgcagcatgctctgggcctcagcttacacataaagcttctggtagtttccaaaaacattttttaagacaatgaaaaccttgtttcaaatactttttttgcagagcctgaaaataatgaaacaattggcttgaagcaggagcaggacacagagggcctctggatcattctttaagacaagttagggattcaaaaccacggacagacccacagcagcaggaggagggagtctgcccacaggctgcagccccaggagctgcttttccacctctgaggtctcccaagggattgtcccatccctcctcctgggggcccacagccaggtgagggaggcggtggccacagcaaatacactcattatttttggacatctttgtgccatgtaggtgtcttcaagaaatatcacgtccaattcttacagccgctaggcttcattttcagatgaaaaaagggttaagagaggaaaatttatcaaaaacccagatagctgaaagtgtggcagagctgaattttgaacccaaatctatctgactccaaatccagtgttgctctcctgggccctctgctgcttctcctgggggtgaggtgtgtgggtgtggggtgggggtgggggtggcagttattaccaactccccgtatagagccacccttgacataagtaactccatcttagaaaaagacttcatcttccatttcatagggcactttgcccacaaggacaaggtgttttgcttgataaatttaaagactgcaaacaaacagacaagcatcctcctccactgtcagtcctcaccagaggactctgtggccataaaaagagcaggactttggcagttcaccctctgctgtcactggtgataagcacccaacatccactgccaaaggctctgcccacattacagactcttccctgaaagactgatgaaccagccagcctagcccagcccagactttttttgtcttcgtggctctccctggactggttcattagccctttttcctatcccctttctcttggtatgtttttcaggttttgccataaatgttaccttatgggtacctgataattacgcgtctagtatatcttgcatggctctgcatgccgagagagcattcatgtaggagaactgcaggttaggtggtactcctaacagaagtgttctctgaatttcatttatgactggaatttcaagcggaatggcaaattcattatatctatcacgtgccatccctaagatagctgattttcttggattcgtttgtccttgtgttagattttttcaagtccgtctccagattttgttgggtctgaatatgggtggacagatctccaggctgatgtgatccagtcccagagggctagaacatatcttggctgattggtgggtttttttttgtttttttgtttttgaaatggaatatcactcttttcttttcttttcctctctctctttctctctctctctttctttttgtttttgagatggagttttgttcttgttgcccaggctggagtgcaatggcgcaatctcggctcatcccaacctccgtctcccaggttcaagtgattctcccacctcagcctcccgagtagctgggattacaggcatgtgccaccatgcccggctaattttttgtatttttagtagagacggggtttctccatgttggtcaggctggtctcaaactcctgacctcaggtgatctgcccaccttggcctcccaaaatgctggtgggattacaggcgtgagccaccacacctggcctggagtctcactctttcttgcccaggctggagtgcaatggtgcgatctcggctcactgcaacctccaccccctgggttcaagcgattctcctgtctcagcctcccgagtagctgggactacaggcgtgtgccaccacatccagctaattttgtatttttagtagagacggagtttcatcatgttggccaggctggtttcaaactcctgacctcaggtgatccacctgcctcagcctcccaaagtactgaaattacaggcgtgagccaccacatccagccttggctgatttgtggttctaatggtttatggtttggtagttttataatagctcatgacagtttcctgctcgtgtagggatgcaatgcgtttctgtgcctgatagtgccgtggtgtctgctgcattctcccacagatgtaggggccagtctgcatctgtgctctgtctttggcaaaaatctgttctcagtttcagtaactctgctgtggtgtagtctccgtcctcactggtgtcctgaggactgtgattctcatagttatcattggtacctctttttctagttattataggtcttgctgtatatacccaccccaagggtcattgtaatgtcctaagttctctgcagggggttcccttggtcccaggggttcctccttaaaagttacccctgacagggatttacttttccttttttttttttctttttcttttctttttcttttttcagacagagtctcgctgtgttgcccaggctggagtgccgtggcgcaatctcggctcactgcaagctccacttcccgggttcacaccgttctcctgcctcagcctcccgagtagctgggactacaggtgcccaccaccacacccagctaattttttgtatttttagtagagatggggtttcaccctgttagccaggatagtctcgatctcctgacctcatgatccgcctgcctcggcctcccaaagtgctgggattacaggcttgagccaccgcacccgacctacttttccttaaaattccttgagctggctctttgcctgtctggcgatctgtgagatactttgcattaaaagtacagggattttttcttttagggcttaacttttttttttttttttttttttttttttgagacggagtctcactctgtcacccaggctggagtgcagtggcatgatctcggttcactgcaacctctgcctcctgggttctagtgattctcctgcttcagcctcctgagtagctgggactacaggcccatactaccgcacctggctaattttttgtatttttagtagggatgggatttcaccgtgttagccaagatgatctcgatctcctgacctcgtgatccacctgccttggcctcccagagtgctgggattacaggcatgagccaccgtgcctggcggggcttaacatttttagggtcctcaagtctgactgtacatcctcagggggtcatacagggagtctttctgacttccaactctatttgggcaatggttcgatttcccaccttagccaaccggatgagtaggggttatgcaataattggcttcctcttctttcagccgagttaaaaatttgtttttaggccgggcgcggtggctcacgcctgtaatcccagcactttgggaggctgaggtgggcagatcacgagttcaagagatcaagaccatcctggcaaacatggtgaaaccctgtctgtactaaaaatacaaaaattagccaggtgcggtggcaggtgcctgtaatcccagctactcgggaggctgaggcaggagaaccgcttgaacctgggaggtggaggttgtggtgagccgatatggcgccattgcactccagcctgggcgacaagagcgaaactccgtctcaaaaacaaaaaatttttttgttttgccaactgccatctcctaagttgagaccatgcttgctatgagcctttctggccccactagcttcctagcctggcatcagccgagaccttgtcagctcttggagctacaggacctgggtaaagaacctcatcacctgaggttttcctcagggagctagactttcaaggtgaagtgagatgacgtctctttttgaagagggtggcagtttgttttttcaaacggcttgatttctaatttaagttttagtggaggctttcgccttagcatcgactataccacctatgcccagtaagctgactgtgccaattctcatgagcggtgcgaggtcctaaccgggtccatgcacctttgtgtctttccacaaggtcagacttattgatgtgacttcaatcacacaaggcgcgagccgcatggagttcccaaagagacagctctccttagtacttcctgttcactccgtagtcagagcctcaggcacacaggctcaaaccactccagtcaatattgcaaactatacataataatattcttaaccaatatataaaagtataaacattccacatcaaagtaacatttaacatcaagagaaaggggataggaaaaagggtttaacaaaccagtccaggaagagccacgaagataaaaagagtctcctggtgtgagctgggtcatttgtcggtcttgccgggaagagtttctgatgttggcagagccttcgttggcagatgctgggtgcttatcacgaatgacagcaaaatggtgtcagtgaagagggcatcttgaggtgccgaagtcctgctctttttaagatgaagtctttttctaagatggcgttacttatgtcaagggtgctctgtacaaggctcctggtcccttgggctgcgtggggagggccctgggcagtgctgggagttgggacgggacttgaaacctgcaggagctggctgctccctggcagagaaccgctgggtttctgtgttgacaacgtcctcacagctgggctgagtcaggtcctgggggactttccttcaggctgtaaccaggtgtggggacttgtggtttacttccttcagtgggagttcttggccgtgggtcagctttgtgttcccctgatgggctggggttacagatctacagatatttctggatcttccttggggccctgcagccccacctgttttccagcagctccttctggcggggcggctgagggcggcgacgggtcaaagggaaaggtgggcgggccggggttttggggtgtctgccagcagctggctgggtctgcagctggccctgtgctctcccaggaggagctggagtgtgtatttctgggaaaagtgatagcctcagggacttctgggatgatgcttataaccaattgtgggagggtccccagggcgtggaagcaaagttcgacctggcacagcagcttcccttcatcccaggtggttgctcaaaatagaccagctgagactctaagccagcttctcctcctggtgacaggaaggggtgagcctcctggaaatggtgggtggagtttctccaactttcaggttcccaagaatgacctggagcacttgaataaaaacttccacatccgaggccctgctcctgatgcatgacatcagcacctccagggagaggggcttgggaatctggatgtggaacaaacactgcatttgtttcagttgattgttattgttctttttcatgaccagacaagtccaggaaatgctgggggttgcgatcaatgggaaccataggcttttgcaggtttcgtgaaaattggcttctagagagatcgattacccctggttggggagtgggtgggaggattccagtgtggcctttcttttcctttctcatttgcccatcggtcatccccagataagcactcaagtgtcctcttttatgaggccccgtgctgggccctggactgccatggtggcaggtggggtgaagtcccgccctcaggagcctgctgaccgcctgctctgtgcacagctgctggagcttccccggggctgctgatttaactggggagggcctgtctatgtggggtccctcctagccggagacaggtcccttttatgaacagcagcctgatgaagaggccttcctgcaacatgcctctggtatcattctcagctcagcattgcccaggggacaaacacagagtttgttcttggcagtcattccctgctgtcatctcaggtgggcttgagccgtgctgggtttccgggaaatctggccaggatccagcacaacctttagccagtccggcagggagcggccacgaggttgtgctggctcggtctttcccttgcaaaggaaggcatcttcgacctgccacagaatgctttcttccccggggaaacccttgcaggtgctcgggctctactttcctttctcgcttgaacaattacagggatagtttatggttctcatgaccctggtgggggtgatgacatcatgggattgaaatccgtcccaccttggagtcaccgagcgtgtcagtcaagagccttggccacaaatcagtggcacttggcagcagcacacaaatccagccaccctgtccttgtctcaggtctgggcagcacagctgtgtccctagctggtggcatcgcccctgccccttgaccttgatcttcagcctcagaagcaggctacccattgtcatgtgactgcccttcacggtccctccccaggattccaaggggcctcttgaggtttccaggttcagccgcttccttcccagcagatcacacccaaccttagccacatgaggaacgatctttagaaagggtctggcccgaagcttcatttttccctgtctgctttggttggaatcttgtgtggctttgtgtgcagttggtagtatttttgttgttggtaagtgtaggggcccttccccattgcttttctctaaggataaccatgctctgagcagcccatggcaaattctggctttggacttgttggtccccagagccagtggggtcgtgggccctggagagtttgcactcagtggcaggtcttagtgtgtgtttgaggaaccaggagagcgttcctctcagagggaggattctctggttgactcacacagagttttgttggctcagcatttagctttcagccctggtgagtttctctgacttaatgggagtaggctggctgcaagaatctttcctatattatcaaataaaataggtctcttttttggccctctagaaatcagtgttttttttcttttcgttttggagagcccggccttggggaggatatgcatcagttgctctagtgtgcctcagacaatgagataagatgaaatagggcgtgctctaggacctctccacttccccttcccgggtttctggatctgacccttcgctccctgcagaaagttgggtgagatggcaatggtccgatctcatccctgctgggtgggatggcagtggtccctcttgggtgagatggtggtggtctgatcttgtccctgctggatgggatggcggtggtctgattttgtccctgctgggtgggatggcggtggtccctgctgggtgggatggtggtgatctgatctcgtccctgctgggtgggatggtggtctgatctcgcccctgctgggtgagatagtggtggtccctgttagatcctggccctttagggtctgtaccctgcttgtcctgagccctttatccccaacctcccgcctggaagtcattcctcgttcccttgtctgagtggcctggagccgagctgtgtttctgggtcctttggccaggatctaactacagtgggccagcaggaagaggctgtgatatttacatggcctctatctgtgtttatggtaagcagacacacctggcttcatagcaccgttttatgtgtgcacctgcaaagatgtttacttttaagaaagagagacaggagaagtgaaagcaggcgcaggcataggatctctcctgtcggctgtggcccagtagagaggtgttatgcctacagttgtctaagtgtctaagtggatgggagttccctgagacctccccctcccacctcccccacccaggagttaaaagagctttgctgcttcactgactttattaactttgtgaccttggacaggccactccctctctttcatcctcagtgttcttatcaataaaacgatgggattatgcaacagtatctctgttacacctgaaaatggagccaagagctaaggttataaaaggaagcagcccagttactgattagacagcacttttaggctgggtggagccacagaactcacactgcagggaggacagaggacccaccattgagctagcgccactgctgacagcctcgctccgtggcagagtctggggtgacccctgagtcaatgccctcagccaccttaccccttctcatgggagtctctgtcttctgtttccctgaatccttgctcccagaattctggaacctaaccacactgggaggcagtaaaccaggaccagattctggatctgccaccaagtactgggtgaccttgcaaaatcagcattcttccctgccttctttatataacacgggtgatagcaccagccagtcttgaatgagtcacaggactgtcatgaagatccagtaagaaaatggttgtgaaattaccctgtgaattggatatacatctaaacatgataaattattatttcattacatttctttttttctttgtttctttctttcctttttttttttgagatgaggttttgctgtctctgtctcgcccaggcaggagggcagtggcatgactatggctcactgcagcctcagcctccctgggttcagatcatcctcctgcctcaacctcccgagtagccaggactacaggtgcatgctgccatgtctggctagttttttgtatttctgtctttcttatcattcactgagccctttgaattgggtttagccgtgttggccatgctggtctcgaactcctgggctcaagtgatctgtccaccttggcctttcacagtgcaagtgtgagccaccatgcctggcccttttgttaaatatctttttttttttttttgagaccgagtctcactctgttgcccaggctggagtgcagtggtgtgatctcggctcactgcaatctccgcctcccaggttcaagcaactcttgtacttcagcctcccgaatagctgggataacaggtgtccgccaccacacctggctaattttttatgttttttgtagagatggagtttccccatgttggccaggctggtctcgaactcctgacctaggtgatccacccaccttggcctccaaaaatgctgggattacaggcatgagccaccgcgcccagccacttttgttactttttttttttttgaaatggagtttcgctcttgttgcccaggctggagtgtaatggcacgattttggctcaccgcaacctctgcctcctgggttcaagcgactctcctgcctcagccccccgagtagctgggattacaggcgtccacgaccacgcctggctaattttttttgtatttttagtagagatggggtttcaccacattggccaggctggtcttgacctcctgacctcaggtgatctgcctgcctcggcctcccaaagtgctgggattacaggcgtgagccaccacacccggcctacatttcttatacatatatacacatacatggtctgttcagagtgtagccgaaatctgtgttttctcattcttaaatatgattagactaccagaggccaccagatgtctaaagaaaacccagcctgaaaggcgaagttccaaagataacataaaaatgtctagttgcagctgggtgcagtggtgcaccctgtagtcccagctactcaggaggctgatgcaggaggattgcttgagccaagaattcaagaccagcctgggcaacatagcaagaccctgtatcttaaaaaaaaaaaaaaaaaaagattgcattgcatctatagctaattttgagaatagacaccttaatattgaatcatctaatccatgaacagcgtatattgctcaactaatttaggtcttttagaatttctcccagcagtattttacatctttcagtgtacaggttttgtgcattttttgtcagatttacctctaagtatttcatatttttgaagctattgtaaatggtgtcttttagttttagtttccagtttttcattgctgatatgccagtacaaagacagctacgggagtgtttctagcagctctgtttgtaatggcctgaaattggagacaccccaaatgtccatcaataggtgaacaggtaaacacatgttgtgtgtccaaacgatgggataaatgcagcaacaaccaaaaggtatgcactgctgggcacacaggaacctgcgtgagtctcagaggaatcgtgcggagtgaaagaagccagatggaagagtgcatactgcagaattccatttacataaagctctgggaaaagcagcctgaagcagatgagtggtttcttggggacaggaaatggattcagggaggaacatgtgggaggggccaggaggagattttgaaggagacggacacgggcatcatcttagctgtggatggtttcatgggtgcatatggatgcccaaaattgtacacttaaatatatacactttattttatgcaataatacctcaatgaagctgctttttaaatttaatggaaggtttgcaagagcaagtcaaagaaattcccaaagtagaaccaaacgctgaagaaacgcaaaatacgggagagaaaagatgacagctagaggcgtagaggatccattcttatccgtgatcttctgaaatgtcatcacaatacaatctgtttggctatatgtgctgtttcatttgtctttctcaccattcactgagccctttgaattggaagatttacaactctcttcagctcttggaaacatcctttcagtatttctttggtaatggtctcttctctgccaggctcagaaaagattgggctcaagtattctagaagacagaggtgagacaagaaaggacattgttagaaatacccaaatctccaccttggccccaagcaaaaagacaaaggccccagcagactcccacagtggatgggaaaaatagtctggagagattgaatcaaagaatatgtgggcttgagaaccccaggtacagaggaaggctgtagagagaggtgaaaagaaggggaatgagtctcttctcctacgtgttcctgaatgctagtggctgggtttaaatcactccagccaggagattagaaaattattctctggagcaatggaaccatccacaggaagatgtatatagtctaaccattgggagtgcccagaaaaaaaatctgtttagccactcacttgtgtccccgccagtgaagccagttgtggcaaggcatgcacacagagcttccaaacagccgccaggagcttgtttctaaataaaaataaccaccaaggatcccccagcatttgaggaaagtcttcaacatggaagaaaaagtcaaaaacagagaaaagatactcaatggaaatataaagatgagaaggttttgcattcatggaacaaatacaagatgccatgaaagaggaaaattcaaagaaacagaaagctcttagaaattaaaattttgataccaaaaatgaaaaactcaattgaaaggttaaaaataatgagatggataatacagagaaaggataaatagaggataaatataataaggattaaggaatggtagaccagaggaaatgaaagggagacataatctaaaaaataagacaggaaaatcactttgggaggctgagatggaaggatagcttgaagccaggagttcgagataagcctgggcaacatagtaagaccttgcctctacaaaaaattagaaaaaaattaactggacacggtggtgtacagctatagtcctacctactcaggaggctgatgtgggaggattgcctgagctcaggagttcaagattacagtgagctatgatcagaccactgcactccagcctgggcaacacagcaagaccctgtctcaagaaaacaaaaagacccaattcaaagcacattctcaaggctttcaaagaaagacaatgaagtcataagtaaaagataatgagtttataacattatcatatttctcaaaagcaaattagaagctaaaaaacagtggaaccctcaaaattctttcttttttttttgtttttgagacagagttttaccctgtcacccaggccggagttcagtggcgcaatctcagctcactgcaacctctgcctcctgaattcaagcgattctcctgcctcggcctcccaagtagctgggattacatgcacgtgccaccgcgcctggctaatttttgtattgttagtagagacagggtatcaccatgttggctgggctggtctcgaactcccgacctcagatgatccacctgcctcggcctcccaaagtgctgggattataggcgtgagccactgcacccagcttgagccctcaaaattctaagtgaaaattatttgaaacctatagttctatacccagccaaagttccataaatgtgtgagtgtagaattaaggtattttcagaaacatgcaaagtatcaaaaaatattcttctcagaaagtatatgttcatctcttctgggtctttgtggttagaaaaaaatttttaaaaagtatgtgttccaccacaatgaagtgtaaaccaagaaagatgaagaaaatgatccaggaaataggagttttaacgcagaaggagattaaggaaaatcccagggcaatggtgaaggaagttccagacaactgctatgagaaaggacaggcggctccaggactgtggccctcaggaagaacatgaaataagttatttaacagatgttacatgtagaagattgagaagagtattgcagagctctcagattgtatgtaaagatttgggtacaagttaaaaagaaaccccagtcaatgaaaattcacagcaggaaaaacaaagacatatacaaagaaaggaaatataatagtgaacaatattttcacaggctaataatgaaaacctagagtatggatataattttttttaaactctgggcctgtaactattgggaggatggggagagaaagggtggaaggacactaaaatccacattgtcataatagaaagtcagccgatgtctagatagatgaatcaagagattatggcgttggcatattatttagaaatatagagacagactccagaacaagcattttgaacacattttaagtggccgtctggggtgtgtttctgtgtgtgatattagatcaagtcacaaatatggccaattaggaaactaaaattggagttacaagtatcctatcccagtaaggcaggagtgaggagaatctttcatgcagtgagttgataatgggtaaatgtgacaaaccaagacatatcagcttaaatttacactgtcgaattacgagatcaccaccagaagaatgacatcaggaaactgtcaaaagggccaacacctgtgggtgtgggatgggctgttgcttttgttgtgagccgtattgagtgggcgtgaggtagttaaactgagagtgccacagtgccaggccatggtgcatccccaggattcagggcgggcagacggcatgtgctatcggcagaagccttcgccggtccgtcactgggtgcagcagacaccccacctgcccctccgtattctggcccctcatcatggatacccttggcagggaggaacccggggaagttgccatcctgtcttttgggcgtttggtttgcttgcttttccctctgttggggctgcgcgtgggtgtggattcccacagtgggcctctcactgtgccttgaggtcctggactggggctcccaaggttaaacacagagcagttttttccatgacagcaccacctttttacttttggctggttcaccattggcagggcaaggccgctgggtagggtgtgcagttgagtgctggccacaggctcctgggccaggtgatggggggattgaatctggtaggggctgtgtccgagggagcagggcctgctcctagaagtctgcacaggggtaccagttgccagtcatgggcctgggctggggccactctccggggcacccacctacgtcaaaggtgattcactgaaggggagacctggatgaccgggttcgacagcccttcattgcgttttaatttaaatgaacaattcgtaagcaatgatcgcctggtgctgtccagaccctgagatgcgtggttgggaaggccgacctcatgttcctcccagagcatgcccagggttcatgtcccggggtctgcgctctgggcagtggtccccatgcctctgggggaagcccccttcttctcacccaagcccctgctttcttctccaagctggacctcacaaaatgtgaacatcttccccagcggggtgcaggggaagagcgggtgagagggtctgagtggtggcgcctctctccctgcagaaagtgaatggcttggaggaaggcgtggagttcctgccagtcaacaacgtcaagaaggtggaaaagcatggcccggggcgctgggtggtgctggcagccgtgctgatcggcctcctcttggtcttgctggggatcggcttcctggtgtggcatttgcagtgtgagtaaagctggggctggctccggggaggacgacaaggggtggctgtccctcttccctcagcggacagacccagggccacctactgagtacacgaggatctcttggcctctctggaaccctgatggggagtgatgggaagcagtcagggctgacccatggccccctcctggcattcattccccattgtggacggcgagggacaggcgggggtggtaccacctcccctgactgagcgccttctggtctcacacagaccgggacgtgcgtgtccagaaggtcttcaatggctacatgaggatcacaaatgagaattttgtggatgcctacgagaactccaactccactgagtttgtaagcctggccagcaaggtgaaggacgcggtgagtgcagcctgcccagagtcctgctgggctgtgtgcgctggtgtcccacctgctgggcaggagggacatgcctcgcctgtgctcccagggccctgggatgggggtgatctgcaaaggggacccgggccctggaggggagggagcagcccgggcttggggcagggtcatcgccgcatggggctcaccttgagtctctgcccttcctcagctgaagctgctgtacagcggagtcccattcctgggcccctaccacaaggagtcggctgtgacggccttcaggtgggtgtggagagaaggctcagtgggatgcaccccagactggctgggagtaggatcggggtacagtgtgtggggcaggaagcgggagatggtgctggaggtcctggcctggagagccaaggagggtcctcgctgtgtcctcctgtgcgttacttggcagcctgactcttctgcccccatggcaaaggtgcctgtagctgttgctgtgatgagctgcccaaaggcctgtgacgtgcttggcatgatgccaggaacggctgtgattctttgttgtttttccaaatttgggtatgggggagttggggtactcaggcagccttcaatgagcccccacattttctgtgcttgagcagtttttcacgcatacttttgtaaaaaaatagactttattctcaaagtgctttttattttgctagttcgtttgaaccctggggaatgctgtgtggcaggtggcattcccagttcctttctcaggtcagaaaacaggctcaggaaggtgacactcggtgtgtcctcgcttgtggccaaactccaatgggtttcccctcctcattcctacccctgagcagcccccagaatcggtctggttggggatgagactgtgagagcagagggcaaagggcaaggcctcttgctttggggtggaaagagggatgacacaagaggagctggggaagggcctctgcagatggcaggcccaggtgtgccccgagccgcccatgtgtcctggagtcgctctgggcgcacgtgggggaaatggggcccagagctccgcctcaggctcccgctctctccccagcgagggcagcgtcatcgcctactactggtctgagttcagcatcccgcagcacctggtggaggaggccgagcgcgtcatggccgaggagcgcgtagtcatgctgcccccgcgggcgcgctccctgaagtcctttgtggtcacctcagtggtggctttccgtgagtccgagggccaggggtgggcgtgggactggccagccttccatggagtggggctgggccctggaccattgcaggggaccggcactcccagggcccagtgccccagagagaagactacgtgctggccgggcacctccctttagataataaggaagcaggaataaggaaatggattgtatcaggaaatgctttattctccttcttattcttcagccacggactccaaaacagtacagaggacccaggacagtaagtatcgtgcccgcctcctcttctgggtggggaagaggcgggatgtggccagatgcccttgagccagtggggtccccagaagcatgtccctctgaatgaagtatattatgacgatctttccaggcccttcctcttccaggcccttctgagaagcccccttcctgatttcccgaggcccagggcagcctggggcgtctcgaaggggcgaggcctgaggtccacacccacggggtctcagggtcctcccccagctctgcccagccctgcccccacacgtgccctccttcttgtctcctgcgcagacagctgcagctttggcctgcacgcccgcggtgtggagctgatgcgcttcaccacgcccggcttccctgacagcccctaccccgctcatgcccgctgccagtgggccctgcggggggacgccgactcagtgctgagcctcaccttccgcagctttgaccttgcgtcctgcgacgagcgcggcagcgacctggtgacggtgtacaacaccctgagccccatggagccccacgccctggtgcagtgagtaccccggggggcgggtagggctgtgggagcttggcggctgccctgtagggggccagcttcttcaacgattgggatacagtttatgactcttggccgcaggccactgctaaacatccaggcagcaggaggcacgtgtggtgtgatcctcagctgcagctccaggggagtctgggaggtgatttttctcagccttggcaaagcagaggaaggctctatagtccccagataccaaatccagcctgtgcggcctgtgccctgaaccgccggagagaaggcactgcccacggttgtaaaatgtaggctttattattcagggatatgaaggccaacagatcaggagatgactgctcttgaaaagacaattttgttggcgggcacggtagctcatgcctgtaatctcagcgctttgggaggctgaggcgggaggatctcttgaggccaggagtttgagactagcctgggcaacaagactctgcctctataaaaaataaaaagcttagctgggtgtggtggcgcatgcctactcaggaggctgatgcaggaggatctccagcccaggaggtcgaggctgcagtgagcggtgattgcaccactgcactccagcctgggcaacagagaaagaacctgcctcaggccacatgaggaaacaccaggttggtcaaggggtaacaggaatgaggggaaaatgtaagcaagagccttttatgggccgggcatggtggctcacgcctgtaagcccagcactttgggaggccaaggcggctggatcacttgcggtcaggagtttgagaccagtcaagccaacctggtgaaaccctgtctctactaaaaatacaaaaatcagctgggtgtggtggcgggcgcctgtaatcccagctactcgggaggccaaggcgggagaatcacttgaacctgggaggcagaggttgcagtgagccgagatcgtaccactacactccagcctgggcaacagagcgagactctgtctcaaaaaaaaaaaaaaaaaaaaagagcctttatatggtttacacagaaaaggcaagacaaatcagggtgagaggtttagaactggcttgtttgaataatttcagtaggctccggggcataggagctgtccctagttctctgatacttgggcctggggtggttagggcaaagaatagtggccctgagtgtgagatcctttcggaggaggtggggctgggcccccataggtgggtttgcatagggaaggtttgcttgcaggtgagtcctttcctatctctaagcattggccagccttccacagtcagcagggcctcagatgtcaaagcacctgcattacagaaaacggaaaggcgtggttaatgcacctgtgggataccccacgtcagggtggggcgtacctcgcagaggtgctgtgcgtggtgggtgagccgcctctcctgcactcgctgggccagagccttccgtggctgtctagggaaatgagctcggcggacgtttcctgattaataatgggctaaaattcaggccaagaacaacctagaaccatctgccgccacagcttcgtaaccaggacttcttttccatctctctaatttattaattgtacaacaaagaagtacatgttcccagtgggagaaggaaatcggcaagcaaaaggaagactaaagtcactcgtcatcttactgtctagaaataaccactgttaattctttttctttgagatggaatctcgctctgtcgcccaggctggagtgcagtggcaagatctcggctcaccgcaacctccgcctcctgggttcatgcgattctcctgcttcatcctctcgagcagctgggattacaggcatgcgccacaacactcagctaattttttttgtatttttagtagagatggggttttaccatgttggtcaggctggtctcgaactcctgacctcaggcaatctgcctgccttggcctcccaaagtactgggattacaggcgtgagccacagcacccggccaaatttttgatgtctattttcccagccttttttgctgtgtgtgtgttaagaaataggattatcccgtgcattcagtctcattacctgctttaacaaatgaagtatattatgatggtctttccaaatcagtcaccctctctctcagggtttttataaggttgcattgtttagaaggaggggacacaatcaggatgacatggttgtgagcagtgtggactctggagcttgaatgcctgagtttaaattctaagcctgccacttattaaccatgagatgttgggcaagttactgaacatctctgtgtctcagtttcctcacctctgagataggggtaatagtatctacttcatagagctgttaggaagattatgagttaatagatttaaaagcaccgagaaccatgccaggcatgtttttttttttgagtctccttgtcacccaggctggagtgcagtggcgcaatcatagctcactgtaaccttgaactcctgaggctcaagcagttctctggccttgccccggagtagctgggactgcaggcaagcgccaccatgcccagctagtttttttgattatggagatgaggcgttacccaggctggtctgaaactcctggcctcaagcaattctcctgccttgacctcccaacaggctgggattataggcccgaccttggcatgttcttaataaatgttgattgttactactgctgttgttctgattgagcccacagtttatttaataaatcctctgttgtgggcatgtattgtgtctagggtgttgctctttttttttttttctgacagtctcgctgtgtcgcccaggctggagtgcggtggtgcgatctcggctcactgcaacctccgcctcccgggttccggtgattctcctgcctcagcctctggagtagctgggattacaggcgtgcaccgtgatgcccagctaatttttgtatctttagtagagatgggatttcaccatgttggccaggccggtctcgaactcctgacctcaggtgattcacccgccttggcctcccaaagtgctgggtttataggcgtgagccactgcgcccggctgggtgttgctctttgattgtgacaaaggtgaactgtttatcactagcgccttccatcagtgattgtgacaaaggtgaactgtttatcactagcgccttccatcagtgattgtgacaaaggtgaactgtttatcactagcgccttccatcagtgattgtgacaaaggtgaactgtttatcactagcgccttccatcagtgattgtgtgggggagggacttacttgaatgaaggtctttttgactccattcttggcctctgtggatgggaccagagttaggggtggggtcctcaggcacctctgcctgagagcctggtttgggtgtgtgagaagcttgggttctgtctgctcttcctaatgcccgccctctgcccccacaggttgtgtggcacctaccctccctcctacaacctgaccttccactcctcccagaacgtcctgctcatcacactgataaccaacactgagcggcggcatcccggctttgaggccaccttcttccagctgcctaggatgagcagtaaggaagggcagggcagggcgggactgcctcgggccacagagaaggggaaggccttagtgggggtgacctgagcttaggaggccacaggctagaccctgtggttggcgagctggcctaggtcagcagcagaggctgaagcttgagccaaaggcatctggccgaccgcctgggtcaggagccctcctgaagcttcggcac

SEQ ID NO: 375 - DNA, 2019 bp, Homo sapiens
tgctggcggtggtgggggtgtctcactctctgtctttatagccggcggtagccaccggggtggctctgtcagagttccgtactcgggagcccctttccctgagtgcccagggtgtctcctctgcccagaggggcagcagctctccctggttctccccagggcagacggggtagggcgggctcaggacccagtgcccatggttcctcactcctaccagcaagcagcaccatcccgcaggcttctcccacctgatggctgttctcccaccgggtctgggctctggaaggagccagatgcccccagaaaggtgggtggtggagacggcaccagatgtaccagttttctgcagttccttataggcgaagggaaccgggtggaaaccaagctgggagaggctgaggatggcagggctggaagggccatcagcgtgaccctcattttcaagaaggggaaactgaggcccagggaggagagtaactgaaggtcacagcacggtcacagcagaggtggccgaacccagccctctgcgcgccagtgctgtgcggtctccacacccttacggtttcctggaatcagggatgttagtgtaagtctataggaatataggggggtgggggggtcaccttttgccttgaaatgggaagtcagtagccccttcctcctcctccctcctccccctcctctctggcagggatctcagatgaccgtggcctcccgctcagagggggagaacgccagagccctggctggtgatgtgctggctgggggtgaatcccaatgagggtccctctcagagcgggagaacgccagagccctggatggtgatgcgctggctgggggtgaatcccaatgagggtccctctcagaaagggagaacgccagagccctggctggtgacatgctggctgggggtgaatccgaatgacagtgcagacgttctcccatccaccatgtctgagcttgggggaattgcctcatttcccctggaaaagaaacatggtccattagaggggaaagcccaggggtgaatcttcacgccccaaacagtgcccggtggggaggaggcacccgctccttgttgagtaaaaccacccatggagactggaacctcatctccctgggtcggggggtgttcaaggccacaggacaaggggagcaccctgggccacacaggcgtggaggtgtccccaccccttccacctgtcccccagacccaaagctctctccccaccctacctgcccacctggggctcctgtgccccctccccactccagaggccaccctacaagttgtcctcaaggtcatcctggagatgggatccaggacgtggggccatgactctctgggaccttgccacagcccccattcccctgcttgcagtctgcaaggacacctttgcagggatttttgtcctgctggccaccccacccacacctgtccctggccagcaggccgcctgcaagcgtcaggcacacaggaacagacatggcgagcacagtgcaggcccggggcccacgggcaacatggaaccctgggaactgccctcccccttagctcacagtgcctgcggtagccactctaggtcgttggccttccttgaccactccatttaattctctctgctgtttgggttgggtttttccccttagttatctgtgggtttcctgtattttatgttaatatttctattaagaacatgttgggcatgtggacccaagcacctgggaaggaggtggcatctgagacagcctgatacgttcccgtctgtgcacccatggagatccaggcgtgggcccgtggctgtccctggttgtaaattcgagggtctgcatatctgatgttcaggtagacctgggcgcctgggaacgaggccatcagctgccatgcacataacaaagagacaatgcattccttcttatttttcctttttaaaaatcgatgaatcatttgtgatgcttttaacaaagattaaatgaatttgatcagcaaaaaaaaaaaaaaaaaaaaaaaaaaaaaaa

SEQ ID NO: 376 - DNA, 419 bp, Homo sapiens
  misc_feature (270)..(270): n is a, c, g or t.
  misc_feature (414)..(414): n is a, c, g or t.
ttttttttcacggtgaaaaatacattttaatccaaaagttttgaatattggcacttagaaagttatttacaatcaattttactataccctttgtgaataaagagataattatgtacgtgtagctacctatagttgtttctttccaactcaaacaccataactatgtggaaaaagggtaagagttaaagctgctgcagctcaaaatcattacaatcaacttagattctgcaaattttcccaggggttgaaaaatgctgggttaaatcaggncaaaagaggagggcaagtgaggtacaccccactcctctcccattttacggtgtttgctcccttactttaacccgggcaaaggacctgcaccctgaatttcttagggacaatttttcatattaccacaggggcctctttattatnggggg

SEQ ID NO: 377 - DNA, 31737 bp, Homo sapiens
gaattcactcaggtatccacaagataatgcaggtctgaggaagggagtggagattttaccaaaagtgcagaaaacatttacataaacctcccaccccgccaaagaaaaataaccaaagtcatcaaatatcatcagtccctggacataagtagaaggacccttagagatcatttaatctcttgctttataaaagggagaactgaaaccctgacagatgagttgtagaagtctcagagctagacaggggcagagctaggactagggcccagagcctcagattccaaggtccaatgacctctttgccagaccacagcatcacccaaggtgtctgtatgacatgttaccaaccccaagacacattacaatttaaccaacgtccaaacgtgggctaccgaagggagaaactgttaagactctcggggaaggagggaggctaagagctggggaagctgggaaagggaaggcttcactgaggaggtgcactaagtcccaggagtacataacaggaaattatggaaatatttcagtaggtagtcttggaaagaaagacctgacagataaaattttctctagagaaaagaaataagttagatttaaaagaccagaagaaggctttgtttgaacattccttgattatatgcaatttagtccttttgttgtcacctgagtttctaacacttggtaatatttttaattccctcatctattctgtctccctatgagacaggactctctgcagagaccacatccagtttagtggttaagaatggagtctctggactcagattgcctaaattcaaatccttgctttaccacttaatagctgtgtgaccttggataaattccttcactaatctgtacctctgtaaaactgacctaatatcaccacccatttcaggaggttttgtgaggattaaatgtgtataagcggtcacaacttattaatgggtttttaatcactttataatgtgtcctttttatatataaagaatagaaattacccaagtacatatactgcatgtagtaacaaatattgttttgcaaaaattttgttacatatgtgtgcataaatgtcttaaatcataatgtaaaatttgtttcttagtggtttttttaaaaatgtgagacactgaatacataaaataaggcttagaacaatgcccagcacacagtaagcacctagtgctgtaactgtcatcgttgctgttatgtacctattaaatgttcgtagagttatataaactaacatgaaaccactttggaaaatatatctgatagtaacataagttaaaggcaaaaagcccttctctttgtctctcatatccacacacaatcagagccctgctcaggcaccagtttgttgcttggcccactagctacgtgttgcattgaactgaagagtccacagactgacctaacactctgtcatgctctgtcaatctctgcagagaaatggaggcttggtgccagagcgaatttatttttacctggttggggtgctggggtgggggaggcaagagtcaagcccatggggagctgacggaagcaagtcagtcatacaaaaaaccatttgctcccccagaggcaggtaggctcaaatgtgccacagacagggccagaccgacagacacctgagcctctgggcaggctgaatcacttccccctccctatcctcaccagacactgcataagacagcatttcagcccgcccgcccgttacaggtgtagctcttatcaggaaaagctgggagctgcctgatacaaaaaggggctgactgcacaacaaaagattacctgaagggctcatttaaatgacaagctcacctaaacgttttaaatagtatttaaattccaaaaccctgatttacagaaaaacctggaaaatgtgctcaccagtaaggaaatctggaggtccatccccgacattgtgtgaccttgaattaagcacttcatctttatgtttgtcttcctctgtttaaaagagagagagagagagagagataagaacacctacctcagaggaccatggtaaaaattaaagatagaatacggtgaactgccttgcatcggatgtgctggcactggccaatgcacaataaacgcctgtcccttctagactaaaaatgaacacttaattgtggtaaactattaataagattcaccggccaactgtcctatgaaaaagtcagaggcactgtagtctcttcgtagctctcgttctctccagcacaacagcccatgctaggaagtctagaaaagcagtaacttatctcattccttaaattaaacagaggtttctaaatgctttggtactgtggggacccaaattatcccttgatactgcccccctattatccactattaagctttaaaaaggcgagagattaaatattgtgcccacattttacagtcattcgcgttcccgtttcaaattaaagggaggaaaacgcgttaaaattaggcctccgaccttcagaccagcctgtgggcttttttaagtcataaaactcgcggaggtggaaggccccggggaggaagaggggtgcattctagagctttcgggccgaccccaatttctcgttggcgacgaatgctaaccacgtgtcgccattttgtgttcaggaaacatggcggccgccccaagggtaaggaacaggggaggcggagtagcgccacgttagccgctttccctgagagattgtgaagcacgttgcgcacggggccctttctggtctggcttagcccaaggaggaaggggaaaaggcagaaatcacaactcataggccagcgtcttgagcgacacttcctcagcgggaagaaccggcaaaaaaggccttccaagatggcgggccctgacggggccgccccccttgagcctggcgcagtggctgcgcccatgggcccgaaaagcagccgcgggagcccaggccgcgcggggaaagccgcagaaacgtcctgaagccctggccggcagcccctgaacaaacgaggcctccacaggcgtacactattgtttctaatgtcggaaaagggtgccgcggtggaaacgacacaagggcaggaggtggggtttctgtggctttaaccgaaagaaacttgcgaaacgcaaacaaagcattatgtaaatggacgccattctttttaggaccacgtttctagcacgccccacaaacagcagagccgcgattcggcaggcggccgtgagtgggtttcggtctttctgcccaccggccgccgccggggagcaggagctggggtgggggatccatgcagggcgcccggacgccggggacgaaagggccccacgtgcccgcccgcgcgcacccgctccgcaggcctcgcctcgccgcccctcccccccggaagagggctgctgcccctcccatccccccacaccctcgcgcacgcgctctggtcacctcacgcgcatgttttaaacccgcggcgtcccggcttgtgcctgcagtttccgccggggctgcccatgtcgttccgcgcacgagcccctcatgtagggcaggaaaataatgtctatcccgcatacacagcactagtattttcagtcacccgccagtgccgttagagttaataaaatacgtcatcattttaaaactttgccggactcacagcttccgcccatcgtgcgcttcattttcactactgcagtgtcagaaggttttttttttaaggaccatgtaagggttggcgcaatcttgtgacctaaaaaagacgggtcctcattttttttcaaggggtcctgcgcagcaagcacttccggggtcagagggtacgcggggttgaaagcgggcttcccgccccgcccagaccgccgaggctgccgccggagtcgccaccgccgcgccctcgcccacccgcccgcccgccgctcccggccccgctcgccccctccgccgccgccgcccgcccctgcgactacgctgcggcctcccgcccgctcccgctcgctcccgcggccctcgctcgcctcgcgccggcagttttgggcctacacctcccctccccccgccagccgccaaagacttgaccacgtaacgagcccaactcccccgaacgccgcccgccgctcgccatggatgccggtgtgactgaaagtggactaaatgtgactctcaccattcggcttcttatgcacggaaaggaagtaggaagcatcattgggaagaaaggggagtcggttaagaggatccgcgaggagagtggcgcgcggatcaacatctcggaggggaattgtccggagagaatcatcactctgaccggccccaccaatgccatctttaaggctttcgctatgatcatcgacaagctggaggaagatatcaacagctccatgaccaacagtaccgcggccagcaggcccccggtcaccctgaggctggtggtgccggccacccagtgcggctccctgattgggaaaggcgggtgtaagatcaaagagatccgcgagagtacgggggcgcaggtccaggtggcgggggatatgctgcccaactccaccgagcgggccatcaccatcgctggcgtgccgcagtctgtcaccgagtgtgtcaagcagatttgcctggtcatgctggagacgctctcccagtctccgcaagggagagtcatgaccattccgtaccagcccatgccggccagctccccagtcatctgcgcgggcggccaagatcggtgcagcgacgctgcgggctacccccatgccacccatgacctggagggaccacctctagatgcctactcgattcaaggacaacacaccatttctccgctcgatctggccaagctgaaccaggtggcaagacaacagtctcactttgccatgatgcacggcgggaccggattcgccggaattgactccagctctccagaggtgaaaggctattgggcaagtttggatgcatctactcaaaccacccatgaactcaccattccaaataacttaattggctgcataatcgggcgccaaggcgccaacattaatgagatccgccagatgtccggggcccagatcaaaattgccaacccagtggaaggctcctctggtaggcaggttactatcactggctctgctgccagtattagtctggcccagtatctaatcaatgccaggctttcctctgagaagggcatggggtgcagctagaacagtgtaggttccctcaataacccctttctgctgttctcccatgatccaactgtgtaatttctggtcagtgattccaggttttaaataatttgtaagtgttcagtttctacacaactttatcatccgctaagaatttaaaaatcacattctctgttcagctgttaatgctgggatccatatttagttttataagcttttccctgtttttagttttgttttgggttttttggctcatgaattttatttctgtttgtcgataagaaatgtaagagtggaatgttaataaatttcagtttagttctgtaatgtcaagaatttaagaattaaaaaacggattggttaaaaaatgcttcatatttgaaaaagctgggaattgctgtcttaaactctttgttggtgccttttttttccctccccttttagcctgaggtgtttggagggaggagggagaagggtgggcccgtccttggtattctctcaagctcttctcaccttatcggtaagattccattccctctgtgccccaacaaaggaacatggcaggctgggcctgctttgggatgtttccagggacagagaggttcaagttccagagagaggcctctgcccatttctctggtagaaacaaggttttctcgaggggaaaaggtgtgcccactcagtaggacctctaaatggcagagcgtcctctccatctaaccagttcccccacccccacctcacaggataaacttaggaacaaaaaaatattctggggtgggaggagcctggggaaggggtgtgggggcagggaaaggaaaggaagggagggcagtgggccggggaggattgggggcttggaggagggcaacagctgccgggtggtggtgggactagaggggtcttggttgggcagcaggggtgggaaggggggaggggacggtaccaacgagacgcacgtgtcaagcatgcacctgtggcaagcagcctgtcagaggatgttattacacctgccaagtggtgtatccagaaacaaaagaggcccagtttccaattcttcagctgtgtgcaatgtttagagaatccctataccaggaaataatcctgcctaaatgggtcagtcttcacaaggcgggaatgtagactgatgcactgactataacctaagaatgatctgagtgttaaagatgcagattcctctgtcccaccccaaaactaatcagctgtatttttaacaaacaccccaaaggagtcttagatttgaatgccactgattgtcttcagtggaggaggaagatcccgctgtgaaggccgtagcaccctcacgcccacgtcagccaataggactatccctgacctgatgagagaaggaaaactgctaggcaaaggcaacattagaaacaatagtatgagaaaatagagcctgagatgagggaaagaagaaacaatagtatcagacaatagaccagtaggtgccaaagtgggtagttcaaaccccaggcactatgggagatcactcatggcaaagagaagttcctgtgggaggggagtattatccacagtaaatattcgttgaggcttattatgtggtcacgcagggttaggcaagcagtcactgaaaggagcccaaattctggagttagacttgctttcaaatttgagttctgcctcctattcatggctttggacaaattaatctctataaatgaagatgttaaaattaacaccttctgggcttgtgaaaataaaatgaaagcatgtatataaaacagaacagtgcttagaacacagtaaatttcagtgtactcgattataaaaagccaaaaggcccatttctgggggctgagggttggccacaaaatctgggcagagaagacagatgattaaaaggtaggaaacaaagcaatgtgtattaaatgagttggactgagaggccaagacaggtggggagggagggggacctagtgaagacccagaagtgggtaccatgccttctgggaacaataagcacaaatccaaatcaaggcaagaggggatataagcttgaaccctcaaacaccaagccaaatagtctttgaagaatccctgaaatgctgggtgaagcagtttgaatgccctatgaaaagcaggtcttaataccaaaaattaggccaggtgcagtggctcatgcctgtaataccaacactgggaggccgaggtgggcagatcacttgagctcaggagtttgagaccaacctgggcaacatggtgaaacctcgtctctacaaaaaaaaaaaaaaaagaaaaaaaaattagacaagtgtggtggtgtgcacctgtagttccagctacttgggaggctaaagtgggaggattgccctgcacctgggaggtcgaggctgcagtggcctgtgatcataccaatgcactcagcctgagcgacagagcaagaccctgtctcaaaaaagaaaaaagaaagaaaagtaggcctcagactttcctgaacctcctccccactgcatcttatactgggcaaagctggcaataatttgtaaaataatgatttaggcagcaaggcataggacgaattgctacttggaaagatgaaaagcaagaatagcagttggcaaactacctcaaggaagaagcaggttctaatataggctggcaagtggtatcaataggaatgcaaggaaaggaactaggcaatggcagagatattgaaactgggtgtggaggccagaggaagatgtaaaaagggggagcaatgaattcaggcacggtgatagaagtatatgcagacagaaatagtcaacaagtagctagaaataagactgaggtgaagtcaaagctgcataggaacagaggtaaatgaggggaagggactagagatggagttttggggtatttcgttgggttgaaggacctagttttcttattcactgggtaccctagtacctgtcaccatacctgacacatagcagggactcagtaaatatttgtaaagtgtatatggaagaggcagccagtgaggacagaaggaatagttgaagcagcaggagagaaatcaggagagtgcccttgagagaagtcaaggaggaacagtccagggctgacggagtgacaataatgctgtaaggaggttatttaacagatttgattgagcagctactgtgggcaaagtactctgaactacatcgtgctgttgtggtgcgcttggaagatgtctagtagctgattatagttaagagtatgatctgtggtaaagggaggaagaggaggtgaaggaagccgtaaaattacttaaggctaaattatcaccagcattgaatgccgtaacaaaggctttgagcgtcatactgaaaatcggtggtctccaaacattttcttaaagtataggccttccatagcaagtctttagcatatgtctttataacttgtttatttataaattatatatgtatgctaatccttatgcttgtttataagctatatataagcagaatcctaaatattatatacattataaacacaaaagttaaatattaccagtttaaaaacaaatgaaatctgaatcaaagacaatttttttaattgaaatctaaactatttatttacttatttatttttgagacaaagtctctattgcccagactggagtgcaatggcatagtcttggctcactgcaacctctgcctcctggcttcgaacaattctcctgcctcagcctcccaagtagctgagattacaggtgcccaccattacacccagctaatttttgtatttttagtagagacacggtttcaccatgttggccaggctggtcttgaactcccaacctcaggtgatcaacccaccttggcctcccaaagtgctgggattagaggtgtgagccaccacacccggcctaaattatttaatttattttgagacaaggtctaactctgtcatccatgttggagtgcagtggcacagtcacggctcactgcaacctcaacctccccgactcagctgatcctcccacctcagcctcctgggtagctgggactacaggcatgtgccaacacgcccggctaatttttgtatttttttgtagaaacagggcctcactatttgcccaggctggtctcaaactcctgggctcaagcaatccgcccttcttagcctcccaaagtgctggaattacacatgtgagccaccgcccctggccaaaatctaaatcttaatagtttttgttgttgttgttgttgttgttgttgttgttgttgttgttgttgttgagactgagtctcgctctgtctcccagcctgtagtgcagtggcatgatagctcactgcaacctctgcctcctgggttcaagcgattctcctgcctcagcctcttgagtagctgtgattacaggtgcgcaccaccacgcctggctaattttttgtatttttagtagagatggggtttcaccacgttggccaggctggtctcaaacttctgacctcaggtgatccacctgtctcggcctcccaaagtgctgggattacagacgtgaaccaccacgcccagccaatcttaatagtttttttatcctttctccccagtcctttcagacaccaaaggaattctggggaagacaatttcactggaatgagtatgtttggggagcagaatttcagaagagtgatgcggggaaaccagtttgcaggaggagaggagggcatagtgggtgaggaaatggaggcaagggtgtccactgctcaaatacttgatggtgcaaaggaggaaaagaaataagtcaaaaagttggccgggcgctgtggctcacgcctgtaatcccagcactttggaaggcggaggcaggcggatcatgaggtcaggagatcgtagaccatcctggctaacacggtgagaccccgtctctactaaaaatacaaaaaattagctgggcgctgtggcgggcccctgtagtcccagctacttgggaggctgaggcaggagaagggcgtgaacccgggaggcggagcttgcagtgagccgagatagcgccactgcagtccggcctgggcaaaagagcgagactccgtctcaaaaaaaaaaaaaaaaaattaagtcaaaaagttgagcagttgagcgggaaaatattgttttgttttattgtttttgaaaggaacctcactaacaggagataataaggaaccaatagtaagctgaacgttaaagatacaggtaagagaagactatggctctagccatagtctgttggactgctggaatttaactctgtcccctcttccatagggacttgcatctcagaattcctctcctttgtcctttctctttggggcagcttgagcatgtcctgtcctcttctggatggaggactggaaattgatgaggcccctatgcagttgctgattcttgtcactgccctgttcctgcctccagctgttaggccatagccactgccatagttgggaagagctggaacaggttgacaaacacctgttgtgtcatagccatagtatttgtatcatgtgtttagaaggctggtctcccccggtccccaatcccctcccttgccccactcaaatatagacacacacacatgcacacacgtacatgaccaccacgagctctcctccagccagtagtttggacagtgaatcaccactcttgggttcacccctagagcagctacttactccctgtgacctgaaaagtaagcagtatttaccaagagcttcaggtttgtgagttgaacccacctcaccccttgctactcttggctaccccaagtggtgaaccacatactgtccagcatccctgggcctgccacctcctgccagtgagacagcgcccagtcagacatacaaataggcagtcacagcaagagaagccttccactaccaagtcctctgctcacctcacctagcctggccacctgaggggccttcctaaaattcagatctaaacacatgtgtcccccgatcaaaggccttcaagtcccacctcacccccatggtctatgaaagaaaacccaaactgttcagcacagttttccaggcccttgaacatctgttccccaccagcctcaccagtgcaaggcctaacaagtctcctgccactaccttcagccttccatacaaaataactggcagtccccccaaagtcattctgtgtgggcatccttgcctgtgggacatcattgtttcttcactcttctgatcctggctgtgctcttcttccttacctccctggggttctggggttcctgttctttgagcatcaacattctgcaaggaaaatcacactgtgctgagaattgggagacctgagttctagtcctggctctggcatcagctcactgggagagcttggacaaattcctccctctttctgggtcttagtcctccatctgagaagacgggataagttcagacccatgattctctggctgccttggaaaataaggcttcctttgtgggcacccatcccagcttctgcctcctgccacagggctgacttctgacacacaggccttctgtaaatactctaacagagaaaagcggaagttgacaaaaaactggcagcaacaagccccagcttggcattttgggtaactattcataggcacttgattgaggaggaagtagaaaggaagaactgcagtgagatttgctcggaacatccctgatctattattgtgcctgtcgctttagactttttcttacttatttattttatttatttatttttaagacggggtcattcactctgtggcctgggctggaggacaatggtatgatcacagcccactgcagcctcaaactcctgggctcaaccaatcctcctgcttcagcctcccaagtagctgggattataggctatcactttagactttgaggggaagatgtaaggacagtagaggggaagaagacagacactccagagaaggttacacacgaggagaagttaatccctaaaagcaggcccaagccctcgcccctcctttcccctgccctcctgccctcaaagcaagggctttgggagagggcttggctgccctgattttcccctataccttgtgtccactgaagtagggagatagtaactgtgctgccctccttctcctcccaggggtggattgtgcctccaaacatctgccactgggctgagtgagccttggtagggagctgagaccaccgtccttcagcgtcagcaaactcatatcatgtcagctagccactcgaatggtgcaagatgccaaactggttattccctgagcagttcagtcacagtaaggtgactctaaatggacggtctgcacatttttcatcttgtctgtaatgacttttattgctcaattgttcttttttatttttttattttttattttatttatttatttatttatttataattttatttatttatttatttattttgaggcagggtgtcaccgtatcgcccaggctggagtgcagtggtgtgatctaggctcactgtaacctccgcctcctaggtttaagcaatcctcccacctcagcctcccaagtagttgggactacagtcataaggcaccacactggctatttttttgtatttttagtagagacagggttttaccgtgttgcccagggtggtctcgaactcctccaagcgatccacctgcctcagcctcccaaagtgctaggattacaggtgtaagccggcgtgcccagcctgcccaatttttcagtcaagaaaacatacatgaagcctggcacggtggctcacacctatactcccaacactttggaaggccaaggcaggaggatcagttgaggccaggagttcgagaccagtctgggcaacatagtgaaaccttgtctctattatgtttaaaaaaaataaaaatgtaaaggccaggaacggtggtttatgcctgtaatcccagcactttgggaggccaaggcgagatgatcagttgaggccacgagttcgagaccagtctgggcaacatagtgagacctcatctctattatattaaaaaaaatagggaccaggcatggtggctcatgcctgtaatctcagcactttgggaggccgaggctggcggatcacgtggtcaggaaatcaagaccatcctggctaatacggtgaaaccctgtctctactaaaaatacaaaaaattagccgggcgtggtggctggtgcctgtagtcccagctactcgggaggctgaggcaggagaatggcgtgaacccgtgaggcggagcttgcagtgagccaagattgcggcactgcactccagcctgggctacagagcgagactccgtctcaaaaaaaaaaaaaaaaaagtacaaaaaattagccgggggtggggacgggcgcctgtagtcccagctactccggaggctgaggcaggagaatggcctgaacccgggaggcggagcttgcatcgcgccacggcactccagcctgggcgatgaagcgagactccgcctcaataaataaataaataaataaatacataaataaataaataaataaataaaaatttaaaggccagaaatggtggttcatgcctgtaattccagcactttgggaagccaaggctcgggaagattgcttgagcccatgagtttgagactagcctgggcaacatggcaaaacgctgtctctacaaaaaatacaaaaaaaaaaaaaaaaaaatagctggtcttggtagtgcacacctatggtcccagctacttggaaggctgaggtgggaggatcacctgagtcccggaggtccaggctgtagtgatccgtgaccatgtcactgcactccagcctgggtgacagagaccctgtctcaaaaaaaaaaaaaaaaaaaagaaagcaatatatgtctttatagagcatacatgaatatctaacacatataaaaatccttattgctattaacatcctctattctttgttgtatgcatatataaatataatacttttcaatatatagagatgcagtatatatatatatatatatgcgcatatatgtatagagagagagagaaagtgtgtgtgtgtgtatataaatatccccctttttttttaagacagagtctcgctccatcacccaggctggagtgtagtggtgccatctcggctcactccaatctccatctcctgggttcaggtgattctcctgcctcagcctcctgagtagctgggattacaggtgcccaccacaccgcctggctaatttttgtatttttagaagagatagggtttcaccatgttggtcaggctggtctcaaactcctgacctcaagtgatctgcccacctcgacctcccaaagtgctggggttacaggcgtgagccactgcgcccagccaaattcaccattttaaagtgtacaatttaatggtttttagtatattcacaagattgtgtaatcatcatcactctctcatgccagtcattttcatcaccccaaaaagtaacctttgcacctattaccagtcatttccatcctccctcacctccagtccccacccccgagtccctggcaagcactaatctactttctggctctatggatttgtttattctgcacatttcatataaatagaattatataatatgtggccttttgcatctgactgctttcatttaatataagttttcaaggtttgtccatgttgtagcatgtatcagtacctattttcttcttttttttttttgagacggagtctcgctctgtcaccaaggctggagtgcagtggcacgatctcagctcactgcaacctctgcctcccaggttcacaccattctcctgcctcagcctcctgagtagctgggactacaggtgccagccaccatggctggcctaatgttttgtatttatttatttttttagtagagatggggtttcaccgtgttaaccaggatcgtctcgatctcctgacctcgtgatccgcccgcctcggcctcccaaagtgctgggattacaggcgtgagccaccgcacccagccttcttttcttttaatggttgaatatattcatattcaagtgtgatatggtcatacaatatatggtatcacatgaccatatgacattttatttagccattcattagttgctggacatttgtattgtttccacttcctgactattatgaataatgctatggtgaacattgaacatttgtgtacaagttttgtatggacatatgttttcatttctttggagtatatacctatcagtggaattactgggttatgtggtaactctatgtttaactttttgaggactgccaaatttttttcacagtggctctatcattttacattcccaccagcagtatatgagggttctaatatttctacattcttgccaacacttttttttctttttttgggatagggtctcactcctgttgctcaggctggagtgcagtggtgcgacctctgctcactgcagcctcaacttcccgagctcaggtgatcctcccacctcagcctcccaagtagctgagactacaggcacgcggcaccacacctggctaattttttgtatttttagtaaagataaggttttgccacattgcccaggctggtctcaaactatctgcctgcctgccttagtctcccaaagtgctgggattacaagcttgagccactgcacctggccacttttttttttttcttttttttactgtagccatcctagtgggtgtaaagtgacacctcattgtggttttgacctgcatttccctaattgagtatctttccatttgcttattggctgtttatatatcttctttggagaaacatttattaaaatcctccccaacctgggcaacatagtgaaaacccatctctattaaaaattaaaaaattaaaaattaaaaaaatttagccaggtgccatggtgtgcgcctgtggtcccagctactcgggaggctgaggcaggagaattgcttgaacccgggaagtggaggtttcagtgagccgagatcacgctatcacaattccagcctgggtgacagagcgagaatccatctcaaaacaacaaaataaaataaaatcctttgcccatttaaaaaattaagttgtctttttattattgcgttgtaagagttctatatatattctatatactagaaccttattagatatataatttgtaaatattttctcccgttctgtgagttgtcataactttcttaataatgtcctttgaagcacaaaagtttttaattttgatgaagaccaattttttctttctgtttttttggttgtggttgcttgtgcttttattgtcatatgtaagaaaccattccctaatctaaggtcacgaagatttatactcatgttttcttctatgagttttatagtgtaagaactagaactataaaaatcttagaagaaaacaaaaatataaatcttcatgacctcggatttaggtctttgactcattttatgttaatttttgtatatggtgtaagattccagatttgttctgttgcatatggatatccagttgttccaacattgtttgttgaaaagactattctttcattattttatatttttttcctattttttaccttaataaattgtgaacattttcactacaataaatactacaattttgtgcgttttttttttagccatatgttatttttttaacctctctcctatttaatgcatatttgtttgtacattttgctgtctttctttctttttcttttctttttttttttttttgagacagagtttcgctctgtcgcccaggctggagtgcagtggcacgatatcagctcagttcaagtgattcttatgcctcagcctctccggtagctggggctacaggcacccgccacagcgctcaggtaatttttgtatttttaggagaaatgaggtttcttcatgttggccaggctggtctggaactccagaacagacaacggaggccgggcgcggtggctcacgcctgtaagtaatcccagcattttgggaggccgagacgggcggatcacttgaggtcagaagttccagaccagcctggccaacatggtgaaaccccgtctctcctaaaaatacagaagagtagctgggcgcggtggcgggtgcctgtagtcccagctatcggggaggctgaggtgggagaatcgcttgaacccggaaggcagaggttgcagtgagccgagatcgcaccattgcacatcagcctgggggacagagcgagactccatctcaaaaacaaaagaacaaaatcaaattattcaaaagaggaaagccttgatttaagggcagctccatttccaaggcttttcatgcacattatcactttgctatagaacagcagttctcaaactttttgatcttatccctttacactcttaaaaattactcagtttggccgatgtggtggctcacgcctataatcccagcactttgggaggtcatggaggaaggatcacttgagcccggaagctcatagacaatcctggcctgggcaacatggcaaagcctcttctctacaaaaaatacgaaagttagccaggtatagtgcctagtgcctgtggtcacagccactcgggaggctgaggtgggaggataacttgagcccatgaggccgcagtgagccatgatcgcaccactgcactccagcctgggcaacagagtgagaccctgttgcaaaaaaaaaaaattgagattcctaaaaagcatttttgttatgtggttaaccatctcacaaaataaagcatataaacattttaaatgtttacatattaattattttacaaataactataataaacccattaaatgctaacataagttgatattttttattaaaaataactattttccagccgggcgcggtggctcacgcctgtaatcccagcactttgggcggccgaggcaggcggatcacctgaggtcgggagttcaagaccagcctgaccaacatggagaaacctcgtctctactaaaattacaaaattagacgggcgtggtgacgcatgcctgtaatcccagctgctcgggaggctgaggcaggagaattgcttgaactcggtaggcggaggttgcagtgagccgagatggcgccattgcactccaaccagggcaacgagagtaaactccatctaaaaacaaaaacaaacaaaaaaatttccaaagcaaaaaaaacttagtgtgagaaactattttgcacactaagatttacatttttggaaatctccttaatgtctgacaatagaatacactgtctcctgtttgtttctgccttaatcacgtgatatcacaatcatctaacctctggaaaattacattctgtgccagtgagcaaacgagagtgaaaaaggcaaacaaattttgttttgttttgtttttttgagatggagtcttgctctgcctcctaggctggagtgctgtggcgcgatctcggctcactgcaacctctgcctcctaggttcaagcgattctacctcagcctcctgaatagctgggactacaggcgcgcaccaccgcacccagttaatttttttttttttttttttttttttttggtatttttagtaaagacagggtttcaccaggttggccaggctggtctcaaactcctgacctcaggtgatccacccacctcaacctcccaaagtgctaggattacaggcgtgagccaccacacccagccacatcttagtattattataaaaatagttccgccgccatctttcttcctggcaggggccgacgcagggaccggcgcgggggtgagagcgcgcggccggattcaccacaacatggcaactctttttataaggaaaatggtgaaccctatgctatatctcagtcgtcacacagtgaagcctcgagccctctccacatttctatttggatcccttcgaggtgcagcccccgtggctgtggaacccggggcagaagtgcgctcacttctctcacccggcctcctgccccacctgctgcccgcgctggggttcaaaaacaagactgtccttaagaagcgctgcaaggactgttacctggtgaagaggcggggtcagtggtacgtctactgtaaaacccatccgaggcacaagcagagacagatgtagaccctttccctccagagtcacgcacatactcgtcatcgcgtctcttgggagaatggttgtatcttatggaaggaattatcacatcaaggagtcaggggaaagtgactggaagcaaacgccctaaaagttacccatcacgtttcagtgtaaatgagtaactatagaagacattgcattatcttatttccaaaatgttccaattaaaaaacattttcctattaaaaaaaagaaaatagttttgacctctcagacccctgaaaggatctgagggcgccctagggccccccaccactctttgagaaatgctactctacagaaagattttaccaaagtgtactgtcatcactgtgcccctttttctgtaccttcaccaacattgggcatcatcttgcttttttttttagcctttgctgatttgttaaacaaaaagcaggatctcttcgtgattttaatttgcattctgaaaggttcatgatttttgaatttatattttttcttttataaaccacctctttatatcctttgcatgttttctttctgggatgggcattttgtcttatttattataagagcactgttgttgtttttttttctggctctatcccaggctggagtgcagtggcgcgatcttggctcacttcaacctccgcctcccaggttcaaacgattctcctgcgtcagcctccccagtagctgggacaggcgccggccaccacgtccggctaatttttgtagctcaccactgagaacaaggtgacaaacatggagtttattgtacctgtgtcagatcaggattagaagactggagacctgtgagtcccctgttcctcacaggggaggaagtggcccatctgggtgggcttcttggcctcaagccaatgctgtgatccccagtagggggctgtctcactgtaccctaaggtggggccagtttatacccaaaattttaacaagggatttgggtatccaagatgttaaagctttgttaggggaaaataggctaagccctcatgacccatttcttcagaaaagatgttttagaataagaaaaggaaactagaatttaacagtctgacaggatattcttgctaaccacaaatttacagaattatagtttagccatagaggtcttctcctttctcaacttttgcagatctctccagtaaatgcctctactgcttgactgctttctgaaataggaaaccattataaagtagaatttgtgtccaaagtgactaggcccagttagctgggattttctccatttcagtgttgtttcccccatccttaagcacactggagatttttctctgccagtttggcaggtgaaaaaaatggtatagcattgttttaattttcatttcttggattactggtgagtaaaaagaaatgttatgtatctctcagctgtttgcatttctcctttagtgaattgcctattcgtatctttttcacctttttctattggagtgttcgtatttttcttaatgattgaggatctcgttatacagtaaaatattaacgcttcgacatataatgcatttttttaatgtgtcagttttcttttaacttctgctctgcagaagtgtctaatgattaagtagctaaatctatcaatctttaactttatggtttctgtctttaaagtcaggtttggaaagtccttccctaacttcaataattgtttttcaaaatttcctcttttttcctcctagtattttatatttccattttgttatactatttaaatctaaaccatctgacatttacttgggtatatattatatatgatgggaagagctagtaattttttttccccaaattgcaggctcgttgtccaatgatatttattgaataatccaagaagggaaaatatgtggtccgagtgaatctgtctccccttcccgggcccccggaagacatttctaatcaaatgcagaactcctggctaaactcagactaggcctcacagcccgattagaactgcaagcagctacctccaacctacgagatttgtcatcaagatgaaacattttgtcattccctaagtaatctatcctttttcctattgatgtgttactgacatacctgtcttttctttctgtgttactgacatacctgtcttttctttctgtgttactgacatacctgtcttttctttctgtgttactgacatacctgtcttttcctgtgccagctccacactgtttggttatcacttccaagtactaaatggtaatgactggtagcaccagtcttataccatttttcaacattttaaaattatttcctcaaacaaaagtcagactcagaatatgtcagaaaatatttaaaaataaaaaataaaattattttttctgatttaaacttttgatttttattacatcaaagtatttccaaaataaattaaaatttaaaattcatattagattttccaatctaggtatacatagtgtttctttccatttttaaagattccctttatttctctgaatgtttttttttcataatgtctttcacattactggtcgactttattcctgcatatttcatatttgtggttgctatcagaagtggaagttttggcagggcgcagtgactcacgcctgtaatcccagcactttgggaggccgaggtggggggatcacttaaggtcaggagttcgagactagcctggccaacatggtgaaaccctgtctctactaaaaatacaaaaattagcctggcttggagctgggcatctctaatcccagctgctaggaaagctgaggtaggagaacctcttaaacccaggagggggaggttgcagtgagccaagatcacaccactccactccatcctgggtgacggagtgagactgtctgaaaacaataaataaataaattttaaaaaataaaagagtaaaagaagtggaagttttttaaatataacatctcatttctcactctgtcacccaggctggagtgcagtggcatgatctcagctcactgcaacctctgcctcccaggttcaaacgattctcctgcctcagcctcccgagtagctgggattacaggggcgtgccaccatgccaggctaatttttgttgttgtttttgtttttggtttttgagatggagtttcgctcttgttgcccaggctggagtgcagtggcgcgatctcagctcactgcaacctctgcctcccaggttcaagcaattctcctgcctcagcctcgcgagtagctgggattataggcatgcactaccacgcccttctaattttgtatttttagtagagacggggtttctccatgttggtcaggctggtctcgaacttccaacctcaggtgatccgcccacctcagcctcccatagtgctgggattacaggcgtaagccaccatgcctggccttaatttttgtatttttagtagaggtggggtttcaccatgttggccagactgatcttgaactcctgacctcaagtgatcctcccaccttggcctcccaaagtgttgggattacaggcgggagccactgtgcctggctttgtttcttattactagaatgtaagcttcatgagagcagagtccacatatcttttgttcataacagccatagagctggccgggcatggaggctcacacctgtaatcccagcactttgaaaggccaaggtgggcggatcacgaggtcaggagatcgagaccatcctggccaacatggtgaaactccatctctactaaaaatacaaaaattagacaggtgtggcagcacatgcctgtaatcccagttacttgggaggctgaggcaggagaatcacttgaacccaggaggcagaggttgcagtgagttgagatcgagccactgtactccagcctggagacagacctagactccgtctcagaaaaaaaaaaaaaaaatagccatagagcttaagaaacagtgcctccacattgtagtttctcaataaaagtttttaaatgaatgaaggaataatggcacaaagcaatgctattattttagtgttattaatttgtaacaggcgccgggcgcaggggctcactcatgcctgtaatcccagcattttgggaggccaaggtgggtggatcacctgcactcaggagtttgagaccagcctggccaacatggtgaaacctcgtctctactaaaaatacaaaaattagccaggcgtggtggcgtgtgcctgtaatcccagctactcgggagactgaggcaggagaattgcttgaacccaggaggtggaggttgcagtgagccgagattgcatcattgtactccagcgtgggcgacagagcaagactctgtccccctcaaaagaaaaaaagaaagagagagagagaagaaagaaagaaaagagagagaaagaaggagagaaagaaggagagagaaggaaagaaagaaagaaagaaggaaagaaaagaaagaaagaaagaaagaaaaagaaaatgagcaaaggaaggatttggtggcaaggaggtcattggtgatcttagtgagtgtggggagtatctttgttgggctggggcgaaagccgcctgtgatggttgaggagaggtgacaatatgcagactgcctctgggctactccttcaagaagcttagcagggccaggcggtggttcacacccacaatcccggcactctgggaagccaaggcatgaggatcactggagcccaggagttcaagaccagtgtaggcaacatgctgaaatcctgtctcttacaaaaaatacaaaaattagctgagtgaggctgggtgcggtggctcatgcctgtaatctcagcattttgggaggccgagacaggcggatcacttgaggtcaagagttcaaaaccagcctgaccaacacagtaaaaatccatctctactaaaaatacaaaaatacaaaaattattgcaccactgcactccatcctgggtgaaagagtgagactccatctcaaaaaaaaaaaaagaaaagaaaagaaaagaaatgaaattagctcagtgtggtggctggcgcctgtagtcccagctactccaggggctgaggtggaaggattgctttagcctgggagttcgaggctgcagtgaaccgtgattgcgccactgccctccagcctgggcgacagagcgagaccttgtctcaaaaaaaaaaaaaaagaagaagaagaagccactaagctaagaggtaggtactaagttgaaggggagacagaatggagataaggatttgggttttttaggtggtagtgacacaaggatgttcataagctgaagaagaaaagaccaacaaacagactaaacatttgagaatgagacagaggaaaaagcatacggagcaaagcacagaggtcacagggtgtgtggccagcagtggtggggacgctgctagctttctctgaagtgggagaaaaggagtgttcctttccctgcactttctcaaccacactgactgaggaaggacagagggggcccagagagcagtgggggtgtccaatcactgttcttgggcctggaaactgttggggctgtggaccccagagtactgaaggactgctggacggagcgtatggctccatctgagcctgtaaatcataaatctacctggtcaaagagtaaaggcctcaaaggttctgagttaattggtctggtttttgacctgagcatcagaaattttttaagctccctgagtgagtctaacatgcagccatggttgagaaccactggggttaagaagtgaattgagacgtatggagacttaaatctccaaccctgggtgggaggacaaggagaggctctgccgccctggctggaatagtggggccctgtttgggttgtggacgtcccttcagtcacaggaggatgaattcctgccttgttcctttggtcggatctgaattcttccccaacctcccgccctaactgatagcatacagggcttcccagacagagaccatcagcccctagggtggcagagaaaggccaggttcaggaatgtgacattaattatgacaaacaatatgttctcccacttaagaactaagcctggttggctgcgcatgtgcgcgcgcgtgcttgtgtgtgggtgtgtggtggggtatgtgtgtgtccggggctgccgattcaactgaaaaacaaaagcggctctgagtctgaagctaaggtttaacaagtgaccaagatgactcatgctgcttggctgcaaaggccacagggctgccacccccagcggggcggggcctgggtgggaagagtcacaggtacagaggctcctgtgacattcacactctgcccctgcatcggctgcctttggggccaaatacttttgtgaaaattaagacagaaggccgggtgcggtggttcacgcgtgtaatcccagcacttttggaggccgaggcaggcggatcacgaggtcaagagatggagaccatcctggcccacatggtgaaaccctgtttctactaaaaatacaaaaataggcagggcgtggtggctcacgcttgtaatcccagcactttgggaggctgaggcgggcagatcacgagctcaggagatcgaaatcatcctggctaatacggtgaaaccccgtctctactaaaaatacaaaaaattagccgggtgtggtggcacgtgcctgtagtctcagctactcaggaggctgaggcaggagaattgcttgaacccaggaggtggaggttgcagtgagccaagactgcgccacctcactccagcctggcaacagagtgagactccatctcaaaaaaaaaacaaaaacaaaaacaaaaagtaactgggtgtggtggcccgcacctatagtcccagctactcgggaggctgaggcaggagaatcacttgaacccaggaggcggaggttgcagtgagccgagatcgtgccactgtactccagactggcgacagagccagactccctctcaaaaaaaacaaaaaacaaaaaagaaccagaaaatgtaactttcttcctatggtcataaatctggtgtaagcaggcaagtcaaagcgatgttgaagccaatggatcttgcaaaggcatggcaatgtttgcacaaggatgggatatagtaagttaaaatacattggctttttccaaacgggctcaaactggaagagaaggtctaagcagagcatgtgctgctgtcaggagggttcctcagcaggagacagggcaccccaggggtgcatatttaataaaaacttacaatatgcaggttttgggacatgaaggaaacatttaacctgtcctgtccaacacggcagccacttgtcacatgcggcagttgaatacttggaatatggctagtctgaataaagatgtaaaacatacgccggattttagacttagtacaggggtgggaaagagtttaaaatagctcagtataggccgggcacagtggttcacacctgtaatcccagcactttgggaggccaaggtgggcagatcacctgcagtcaggagtttgagaccagcctggccaacatggcaaaaccctgtctctaataaaattacaaaaattagctgggaatggttgcgggcgcctgtacttccagacactcgggaggctgaggcaggagaattgcttgaacctgggaggaagaggttgcagtgagctgagatcacaccactgcactccagcctgggagacatagagactccgtctcaaaaaaaaaaaaaaacctctctctccatgtatatatctgtgtgtgtgtgtgtgtgtgtgtgtgtgtgtattttttgtttgttttgttttcacggctcactgcagcctcaaacctctgggctcaagtgttcctcctgcctcagcctcctgagcagctgggactacaggcgctcaccaccatgccaagctaaccttttacttttttgtagagataggttcttgctattatgtccaggctggtctcgagctcctgggctaaggtgatcctcctgccttggcctcccaaagtgctgggattaataaaccaccatacctggccaaactcaataatttattaatactttaaaaatactgactacgagctgggcacagtggctcatgcctgtaatcccagcacactttgagaggctgaggaaggcagatcacttgaggtcaggagttcaagaccagcctggacaacatggcaaaaccccgtctctactaaaaatacaaaaattagctgggcatagtggcacacacctttaatcccagctactcgggaggctgaggcaggagaatcacttgaacctgggaggcaatggttgcagtgagccaagatcccgccactgcactccagcctgggcaacagagcgagactatttctcaaacaaaacaaacaactcttatcacccaggctggaatgcattgacagaatcctagctcactgcagcctctaattcctgggcccaagtgatcctcccgctttagcctcctgtgtagccaccccaccagccttaaatgttttttcaacctgatagaaagatatagcaatctgtctgctctctttcctagtcttcctttttttttttgtttttttttacaaagattgctaaacatttatgacatgctggtagagtaagagatacaggaaatgggcggggcgcggtggcttacgcctgtaatcccagcactttgggaggccaaggcgggcggatcacctgagattgggagttcgagaccagcctgaccaacatggaaaaaccctgtctctactaaaaatacaaaattagccaggcatggtggcacatgccagtaatcccagctactcgggaggctgaggcaggagaattgcttgaaccgtggaggcagaggttgccaagatcatgccattgcactccagtctgggcaacaagagcaaaactccatcccaaaaaagaaataataataattctttctaaagaaggggtctcgctatgttgctcaggctgaggcgcagtgactgttcacagatgtgatcataacacactacaacctcaaactcctggcctcaagggattctctcggctcagcctccggagtagcagggaccacaggcatgcgccacggcacccagtgtggcacattttaaaaaatgcagccacttaagggcactttctgttgttttatttatctttcaagttttacttatttataaatctatgcacacatacacatgtactattggatgagagcagcaggaggctgtggaaaggatacttggcataaagccaagagcacttgtctccaggtctgatctcccacttcctggggctcaatttccccattcataaaatgggtgggttggcctagataggcctaaggactcttccagcttagatattgcaggattctagattgaagtcaaactgttccttagattttgtgtctgatcccacagccagagagcagggctggtttccttgttaatgcgatccagtgctgtcagccatgagagacttcacctttggaacagaaatttccatctgcatcctctctgcagatcatgcctatccctcctccccactgacaccccccctcatgtaaatcagcctggggaatcagatcttggagaaacttcgatctctttatctggaaggcacaaagatagcattgcaaagcctgctgctggtgtggaggtggtgttcaggaatgcttcacatttttctagcaagtttcattcctagtagtataatcttgaggagaggcctttccccagggaggctttggggaaactagcaatggaatgagggaaagaacatggactgggtgggagagagccttctttagaaggaaatactggcaaaatccggtattgcaaagttttgaaaaaatccatcctgccgggcacggtggctcacgcctgtaatcccagcactttgggaggccgaggcgggcggatcacaaggtcaggagatcgagaccatcctggctaacctggtgaaaccccgtctctactaaaaatacaaaaaaaattagccgggcgtcgtggtgggcgcctatagtcccagctactcgggaggctgaggcaggagaatggcgtgaacccgggaggtggagcttgcagtgagccgagatcaagccactgcactccagcctgggtgacagagtgagactccgtctcaaaaaaaaaaaaaaaaaaaaagaaaaaatccatcctattgcatttgcttagaaagaacctggggctgggcagtcggcctggctctgtcactgtgtgattttaaaagacatttaatgtttccaagctactgagtgcaacaggtttctcactgagcttgattttgcacccctccagcccaccctctatctacaatgctgccagcactgactctaaaatgcacatgactccacctccactcccaccccactgactccattacctgtagcaaaaaataaaagaaaatctaaactcttctctatgacatttgaagcctttaaaatctggtcccaggctacatttttaatctcatctcatactctccagctcactgagcccctttccctattgtcctgagtccgtatctgcctctggacagccatgagctccactgggaaggacagtggcttggccaccccagctgtgttcttcccccagtaccctttccagttcctggcacagaggctcagtaaaggtttgatgcctgaataaccaactaaatgggcaatcatgtaaatcaaggaaggcccatggactggacaactcctaaattcccttccagcactaacttctgagtaatgttccccagggcagagctcaaaactgcttaggacttgacctagttcatactgttactgcagtttgaaaaacagagacaggtggtctgacaaagggtttaaaagttttttattcatatgacaattttgcatacagcagaaaaattaaaatacaatgcaatttaaatatttaaaattgctttaaaacaagatcatcctatggttacacaacaatgtgaatgtgcttaatgccatgtacacttagatggctgagatggtaaactttatgttatgtgtatttcactacaattgaaaaaaaacaagactgccaggcacgatgtctcacgcctataatcccagcattttgggaagccaagacaggaagatcacttgaggccaagaattcaagaccagcctgggcaacaacagcaaaaaaatcttacaattagttagccatggtggtgcatgcctgtggtcccagctactcgggaggctgaggcaggaagatcgcttgaacccaggaggttgaggctgcagtgagtagcgttcgtgccactgcaccccagccagggcgacagagtgagaccctgtctcaaaaaaacaaacaaaaaactcaagactttcctggatgtgtagttgctaccaccatgcccctggcccttctgtagagggggcttttaaagagataaaacaaacaaaaatctcaagtaggagaagtattgaaacctttgattcctagagaagatggagaaagaaaggattcctggtttaacaaaatgttaaatgtagtgaaatttaaagtaccctaatatcaccaatgcccagaagcctcagccatctgtcacactgagggctaggaaatgagcaaaaatgcctctgtgggaccacaagaaatatcattagactaatcaaagaaccaattttatgaagtagatgatcccaatttttaaaactgtaaagaaagcatttacgtttttgtttttgttttataaagacagggtctcgctgggtgcagtggctcactcctgtaatcccagcactttgggaggccaaggtgggtgaaccacaagctcaggaggtcgagaccatcttgtccaacatggtgaaaccccgtctctactaaaaatacaaaaattagttgggtgtgatagcacgtgcctgtaatcccagccactcgggaggctgaggctggagaatcgcttgaacccgggaggcggagattgcagtgagccgagattgcgccactgcactccagcctgggtgacagagtgagactccatctcaaaaaaaaaaaaagaaaagaaaagacagggtagacctctgttgcccaggctggacggagcgtagtggcgcaattatagctcaccatagcctcaaccttctggcatcaagcaatccttccacttcagcctcccaagtagctaggaccctaggtgtgtaccaccatgcccagctaatttttttggcgggggtgtgggggagggttcacactatgttgcctaggctgatgtcgaattcctggctgcaagcaatcctcctgccttagcctcccaaagggctgggattacaagagtgagccactgcacccagtggttaccattttatagtcaaggaaattaaagcttagaaaaagtaacttgtggctgggtgccgtggctcacgcctgtaatcccagcattctgggaggccaaagggggtggatcacctgaggtaaggagttcaagaccagcctgaccaacatggagaaaccctgtctctactaaaaatacaaaattagccagatgtggtggtgcatgcctgtaatcccagatactcggaaagctgaggcaggagaatcacttgaacctgggaggcggag

SEQ ID NO: 378 - DNA, 2128 bp, Homo sapiens
ccaagatggcggcgcccagcgaagtggccgcgatagcccctggcgaaggcgatggcggaggcggcggctttggctcctggctggacggacggttggaggcactgggagtggaccgagccgtttatggagcctacatcttgggtatcctgcaggaggaggaggaagaagagaagctggacgctctgcaggggatcctctctgctttcctggaagaagattccctccttaatatctgcaaggagattgtggaacgatggtcagaaactcagaatgttgtcaccaaagtgaaaaaagaagatgaagtacaggccattgccaccctaattgagaagcaggcacaaatcgtagtaaagccaaggatggtgtcagaagaggagaagcagagaaaagctgccctcctggcccagtatgctgatgtgacagatgaagaggatgaagcagatgagaaggatgattcaggtgctaccacaatgaacattggttctgacaaacttctgttccgaaacaccaatgtggaagatgtccttaatgcccgaaaactggagcgagactcacttcgggatgaatcccaaaggaagaaggaacaggacaagctgcagagggagagagacaaactagccaagcaggagcgcaaggaaaaggaaaaaaaaaggacacagagaggggagcgaaagcgataaccttggcctactctattctttccccccatgaacttatcaaagggagaactggttgtgtatttaagagaaatgagagtgcattgcaaagtagtttcccaaggcatttcccctattgtttacatggtcaaaaggaaaatcaaaatcacttctaattacaaaatgtgctgttttggtggggtgggcaatcagattattatagttgatgactgtaccaaagatctggaatgggggccacctttatattttaatactcaagtcctgtgctccttttggccactttaaaaagtcttccctcaccttggataaataggattcagaaagctaacagttttcattctgaaggagcagaaacataatcaatccctccctgagataaaatgtgggcatgcacattgctttggagtcagtattcagctgtaagtgtagtattgttttatggctgaaatagaaagctaatgaagaggcctacctggatccagattttatgttaacatggcagcaaaactaggaaaatgggaagaaattacttgcggggtgttctagatctgattttttttttttttttgaaagtttcagcctgtgggaggaaaagaggtatcttttaaaatagagatagttacatattttcctcatctaggctgtgtcactattgggtgcaaggatatcattgttggctagattcattttgtataatcatgtatcctcttgtgtgctggtagagattttaatcctgatttttccataaaacatgagtattaagaaataattcctggtttggagaaactggagaaatcacccttttaaggaagaaacactggaaatttctgctaacaccaagatatttaagagtgtacatagtaggtgctcaacaaatttattgaatgaatgagtgaatggaaaaactgggagagtcaaaagtgagcagaagctctccatttctacttctgtcacaaaccacattaaattgtaaataaggcccttctccacttgacttcaggcagcagattgtctagaagcctaaggacagcaatttctctgacaagacaaagtagatattttataccaggggttggcaaactactgcccacgggccgaatttggcccagtctgtttttgtatggtgcaaactaaaaatgatttttacatttttaaagagttataaaagaaaaaaatatgtggtctgtgaaatctaaaatatttactacctggcctgttggaggaaaggtttgccaatctctgttttataccattaactatgagattaacaaaaacttttacctttgtgcagaaggttaaaaaaaaaaaaacatggttaaggaaaaggagacatgttacctcttcatacactcctataactgtggcattgcaaaaaataaaaataaccacctttaaaaaaataaatcttatttaaattgcaaaaaaaaaaaaaaaaaaaaaaaaaaaaaaaa

SEQ ID NO: 379 - DNA, 2593 bp, Homo sapiens
gagaggcttggagagagcagacgccttctggattcaagaagacgaggctcacctgttactcggcctcccagaaagatggataggagaaatgactacggatatagggtgcctctatttcagggccctctgcctcccccggggagcctggggcttcccttccctccagatatacagactgagaccacagaagaggacagtgtcctgctgatgcataccctgttggcggcaaccaaggactccctggccatggacccaccagttgtcaaccggcctaagaaaagcaagaccaagaaggcccctataaagactattactaaggctgcacctgctgcccctccagtcccagctgccaatgagattgccaccaacaagcccaaaataacttggcaggctttaaacctgccagtcattacccagatcagccaggctttacctaccactgaggtaaccaatactcaggcttcttcagtcactgctcagcctaagaaagccaacaagatgaagagagttactgccaaggcagcccaaggctcccaatccccaactggccatgagggtggcactatacagctgaagtcacccttgcaggtcctaaagctaccagtcatctcacagaatattcacgctccaattgccaatgagtcagccagttcccaagccttgataacctctatcaagcctaagaaagcttccaaggctaagaaggctgcaaataaggccatagctagtgccaccgaggtctcgctggctgcaactgccacccatacagctaccacccaaggccaaattaccaatgagacagccagtatccacaccacagcagcctccatccgaaccaagaaagcctccaaagccaggaagacaattgctaaggtcataaatactgacactgagcatatagaggctctaaatgtcactgacgcagctaccaggcagattgaggcctcagtagtggctatcaggcccaaaaaatccaagggcaagaaggctgccagcaggggcccaaattctgtctctgagatctctgaggccccacttgccactcagatagtcacaaaccaagccctggcagccaccctgcgggtcaagagagggtctagggctcggaaggctgccactaaggctcgggcaactgaaagccagactccaaatgctgaccaaggggcccaggccaagatagcctctgctcagaccaacgtaagtgcccttgagactcaggttgctgctgctgtccaggccctggcagatgactatctggctcagttgagcctggagcccacaaccaggacccggggcaaaagaaaccgaaagtccaagcatctgaatggggatgagagaagtggcagtaattacaggcggatcccatggggccggaggcctgcaccaccgcgagatgtggccattttacaagaaagggctaataagttggtgaaatacctgttggttaaggaccagacaaagatccccatcaaacgctcagacatgctgagggatgtcatccaagaatatgatgaatatttcccagaaatcattgaacgagcaagctacactctggagaagatgtttcgagtcaatctgaaagaaattgataagcaaagtagcttgtatattctcatcagcactcaggaatcctctgcaggcatactgggaacgaccaaggacacacccaagctgggtctcctcatggtgattctgagtgtcatttttatgaatggcaacaaggccagtgaggctgtcatctgggaggtgctgcgcaagttggggctgcgccctggggtgaggcattcactctttggggaagtgaggaagctcatcacagacgagtttgtgaagcagaagtacctggagtacaagagggtccctaacagcagaccacctgaatatgagttcttctggggcttgcgctcctaccacgagactagcaagatgaaagtcctcaagtttgcatgcagggtgcagaagaaagaccccaaggactgggctgtgcagtaccgcgaggcagtggagatggaagtccaagctgcagctgtggctgtggctgaggctgaagccagggctgagtggttccaacaccagcactggctttactggcgaacccagcaccagcacgggcttcagtagtggacccagttctattgttggcttcagcggtggaccaagcactggtgttggcttctgcagtggaccaagcaccagtggcttcagcggtggaccgagcacaggagctggcttcggcggtggaccaaacactggtgctggctttggtggtggaccgagcaccagtgctggctttggcagtggagccgccagtcttggtgcctgtggcttctcgtatggctagtgaggtttcagatttattccccatgtttacagataccgctaataaattgcagtagtccttcccatggagccaaagtacatccttggaatctttgtccacacagcagtcaaggcagttatggccaatcagctgagggtgtcatgtgatggaaaaatctgtttgctgttcctgctttattgtttgctttctgtgtgctgtcatattttggtatcagagttacattaaatttgcaaaatgaaaaaaaaaaaaaaa

SEQ ID NO: 380 - DNA, 4047 bp, Homo sapiens
aggtgcgggggggccatgctggcctcggccgcgtcccgtccctctagctgggggtcactgcgagccgcctcgctcggcggccgctcggtcatcctgtgggcagacagacaagcggatgcccgctctgacgaccgcccctgacccaccgacgtgggctggggtaaaggggagaagggcagagagaggaactcacgcaccgagacgtgagaagaggcagacaaagttagcgccacgtggggctagggcgggaggccggttggggctagggtgggagggaaagagggtctctggattgggagaagggaggggtgcctgggagacacagagactgagggccaaaaggacagagatggaggaagacgacagagacaccggaagaaaaggaatacagccagcgacagaaacacagaaggggaaatcaggaggaaggaaatgtacaaggaggtgtgctggggctcttccatcacctggcttcatccagatagagctgggcaccagcaagaaccaaaacagaaaaatcaggagactcaagggccagagtttgtgagttgtgagttgtacatatatgatcaacaccacataagttgtttaaaataagctttctgctctctgaattatataattgggtatttaaaagaagaaaacaaatacaaaaaaacaatttacccccatgcagagtccatctaaatcatacatagcagccattgagctcccatactgccactgcaatgctctggacaggagtcatcctaggaaccatccctcccaccccagaagggagaatggatcatctgcagcctcctctggagcttggctcaattgccactaggcacccaggatgacagagagtcaagattcagactgctgtacaccttctttgggaatgccagccccccaggtctggcacagaaaccacaaaattccctaagtcctggtgtatacaagctgtaaaggcagtaggtccctgacacttcattggaagtgagtttatgattttggtggagacaataggtctctatccatagaatgcaaccaccaagacaccaaggccactggaaatgcaccagaagtatatcagccaggtcctcttgctcccagcagcagcgaaatgtgccagaaatataccaacccctgggaaacatacaagcttcaaggtattggttccctacctcactgctctccgtcctgacacaccggtgtgagcccagtgatccatgcttaagccccagcttctaaccgagtgacagtgtgcactgcagttgcagactgagctcaagctctgttatgacacatttttaccctccaattaattcttaggctcctgctctagcggtggattcctgagaggcaatgggagtacatattccagatgaattgaccctggccacaaatgtcctctccagacacctataaatatcccatctccaaggttccttgtaagaaatatatgattggatcccaggatctgtggaggacctctcccggctcctccccacattttaggaaaatcctgccggtttaggattaccagccagaggtccatgccccaaagaagccactcacaaacactgatggttgttggcgactaaggtgcatcacttgatttggattacagaaaggaacgcccgagagattttgtttgtttttatttggggagaatgaaggaggagggagattttagactgaatcgttctagagtatttgacgactacagctcctctctctttgtactacggagaccctgcttatagcccccaacaggaaatcctcatctgcggttgccagacagccagaatatttccacctgtgccagaacaagacagaagaccccaggagattcttcctggggacaggtctcaagcagacccaatcccccatacagagaatttcttagatgaaaacagcctcaggcccttagacccagcctctggtctctcttctgggcccacaccagcacaacaccctggagaagccccaagcctgcacaagtaccaaacccaccagggaacagcaccaccatcctcgcctctaccggagaagaggggtgttcctgcctccccaccctaggcctcaggcctgggatcagggcccactcgagctgggactgcactagccaggaaggctgccgccttcctcctgcgggagctccaggcacagtctgtaccacccggatacagccgccccaaagttaccggccttgggaaacgtccacagaaccgggaccaatgggaaaggcctggacgactaagtccaactagctggttttaccctgggtggaaaagggaaaaagccgctgaatgccacagaggcagctacagcagtcagatcccgattccaagctctggctggtcctcccctccccccacccccaatctgagaatgggctctcctctgtcctgagccttcctcaccccaggccggaacacaaggccttcctagacaccgtttccaccggcaccattcccctgaaaactcacctggggcatatttagagagaccggcccctctgaataggatctccactccgccggaaaggggcggaagccgaggaagaggatgcacacccgggtctttgctttccccctttttcgctgagaggcctgcagttacgctgcggtgtggtcctgggcgatctgccgcgcccaaagcgagtttccaggaaagataggggtggagagaaagaggcagggcaagagggagggagagagagaaatgggggtcaatggctgggaattacctcctgtccccgaccaaccagtccagggaatcgcaaacagctttccgcccccaacctgcaggtgtttggagcctttcctctaccccctcctccccccacccgccttaaaaaaccctatacatgaccaatcaggaatagctatttagtccaacagcaacaacaacccctcccgacaggctgtctggaacattttcgaaccctccaactgggatcggtctggttcagtgtttgttttctaagcagggaggtgtctacgcggttgcctcctcagccaggtctccggctgccgctacaccgcgaagggatagtcccgggcctggatgggcggaggtccgtgttgggaaaggcgaatagtcttcagactctggtcggtgggacagaaccttgaagtcccccccacctcattctctctctgacccccatccacccacctccagcccaaagcgaaaccagaacccaattccaggggctgtactttcctacagaaatggagttgggaagggggcttggagagagatatctgatctgttcaggtcctttctcgtctccctactgattaagagaaagaagaaagagagaggaagagagagacagaaaaagaaaaggaaataaagaccaacaaagggggaaagaaagaaacaaaggggaaaagtcccccaccttcccctccaccacccctacgaaatgattttcgatttttcggggtttagacagagtaagggagaattctaatgatttgttacagcaataaacaaggtaaaaggaaaggaggtaaaaacaaacccgacactactttcaaggatgtagcaggattgagcttgcttttattttttcctagtggattttgtttaatttgttttgcctaaatcgtcaggcttatgatcacacatcgaagtcttggattaactgcgaaggcctccttctatttgccgcggctttggtggacatataggaataattcttccctggattgcaatacaatgcggaagattttctttctcctcttctaatccaaaagaggggaggggaggaaagaagaggggaatccatccattcccggcgtgttcgcggggggttaatgttgcgtgttcgctgggggttaatgtttgccttatgaccaagtctctgtgtccgtgcctctctccattttctcttcctacctcaaacccagcaacttagaaaacggctgtagcggaaaaaaacccgctgctttgttctcccgccaaaggagccaaaagggacaaactgctgcgctctgggatgattattttaattaaaatagatgttaatgacgaaaaaaaaaaaaaaaa

SEQ ID NO: 381 - DNA, 379 bp, Homo sapiens
  misc_feature (376)..(376): n is a, c, g or t.
ttttttttactcttccacatccttttatttactattttctgatttttaaaatgacagtggcaattaccatttatactgtgttatttgtataagctgttaaacacaacattgttaaacacaacgaaaattcatttttctacctgaaagctgtatcatagaaaattattttcaagtttatattcaacagcttaataatgttcaaaccagggctgggcgcggtggctcccagcactttgggaggccgaggcgggtggatcctgaggctaggagttcaagaccagtccggccaagatgggtgaaaccctgttctctaccaaaagtacaaaaattaggctggggcgcggtggtggggcgcctggcaattcccagcttaccnggg

SEQ ID NO: 382 - DNA, 4192 bp, Homo sapiens
agcggataagctccagccttcctgtggccacagcaggaccagagtggaccagcacaccccaggagagaggactggggtcccaggagtaggaggagcccgagcaccatgagctccggagaccctgcacacctcggcctctgcgtctggctgtggctgggcgccaccctgggaagagagcaagttcaagcaagcggtctcctgaggctggctgtgctgcctgaggaccggctgcagatgaagtggagagagtcggaggggagcggcctcggctacctggtgcaggtgaagcccatggcaggggactcggaacaggaggtgatactgaccaccaagacccataaggccacagtggggggcctgagcccctccaagggctacaccttgcagatcttcgagctcactggctctgggcgcttcctgctagctcggagggagtttgtgattgaggatctgaagagtagctccctggacaggagcagccagaggcccctcggctctggagccccggagcccaccccctcccacacggggagcccagaccctgagcaggcttctgagccccaagttgccttcacaccaagccaggatccgcgcactcctgccggcccccagttccgctgcctgccccccgtgcctgctgacatggtcttcctggtggacgggtcctggagcattggccacagtcacttccagcaggtcaaggacttcctggccagtgtcatcgcaccctttgaaatcgggccggataaggtccaagtaggcctgactcagtacagcggggatgctcagactgagtgggacctgaactccctcagcaccaaggaacaggtgctggcagctgtgcgccgcctccgctacaagggggggaacacgttcacaggccttgccctgacccacgtgctggggcagaacctgcagccggcggctggcctccgtccagaggcagccaaggtggtgattctggtgacggacggcaagtcccaggacgatgtgcacactgctgcccgtgtcctcaaggacctgggcgtgaacgtcttcgctgtgggtgtgaagaacgccgatgaggctgagctgaggctcctggcgtccccgccgagggacatcaccgtccacagcgtgctggacttcctgcagctcggcgcgctggctggcctgctcagccgtctcatctgccagaggctccagggtgggagcccgcggcagggcccagcagcggctccagccctggacaccctccctgcccccaccagcctggtcctgagccaggtgacctcctccagcatccgcctgtcctggactccagccccccggcaccccctcaagtatctgatcgtttggcgagcctctagaggtggcacccccagggaggtggtggtggaggggcccgccgcctccacggagctgcacaacctggcctcccgcacagagtacctggtctccgtgttccccatctatgagggcggggttggcgaaggcctgcggggcctggtgaccacagcacctctgcctccgccccgggcgctgaccctggccgcagtgacgcccagaaccgtccacctcacctggcagccatcggccggggccacccactacctggtgcgatgttctcctgcttcccccaagggtgaagaggaggagcgagaggtgcaggtcgggcggcccgaggtgctgctggatggcctggaacctggcagggactatgaggtctcggtgcagagcctgcgaggccctgagggcagcgaggcccggggcatccgtgccaggacccccaccctggcccccccgagacacctgggcttctcagacgtgagccacgacgcggcacgagtgttctgggagggtgccccgaggcctgtgcgcctggtcagggtcacctatgtgtccagcgagggtggacactcggggcagacagaggctcctgggaacgccacctcggccacgctggggcctctctcttcctccaccacctacactgtccgtgtcacctgcctctaccctgggggtggctcctctacgctgactggccgggtgaccaccaagaaagctcccagcccaagccagctgtccatgacggagctgccaggggatgcagtccagctggcgtgggtggccgcagccccgtctggcgtgcttgtctaccagatcacgtggacgcccctgggagaggggaaggctcacgagatctctgtcccagggaacctcggcacggccgtcctgcctggcctagggaggcacacagagtacgacgtcaccatcttggcctactacagggacggggcccgcagtgaccctgtgtccctccgctataccccctccacggtgagcaggagcccaccctccaacctggccctggcctcggagacccccgacagcctgcaggtcagctggacgcccccgcttggccgcgtgctccattactggctcacctacgcccccgcctctggcttgggacccgagaaatccgtctctgtgccaggagccaggagccacgtgacactgcccgacctgcaggcagccacgaagtacagggtcctggtctcagctatctatgcagcaggcaggagtgaggctgtgtctgccacgggccagacagcctgcccagccctccgccctgacggctccctcccagggtttgacctgatggtggccttcagcctggtggaaaaggcttatgcgtccatccggggcgtggccatggagccctctgccttcggtgggaccccgaccttcacgctcttcaaggacgcccagctgacaagacgggtcagtgacgtctacccagcccccctacctccagagcacaccatcgtcttccttgtgcgcctacttcccgagacaccccgtgaggccttcgcgctgtggcagatgacagccaaggacttccagcccctccttggggttctgctggatgccgggaagaagtccctgacctacttccaccgtgaccccagggctgccttgcaggaggccaccttcgacccgcaggaagtgaggaagattttcttcgggagcttccacaaggtgcacgtggctgtgggccgctccaaggtcaggctctatgtggactgccggaaggtggctgagcggccccttggggagatgggcagcccacccgctgccggcttcgtcacgctggggaggctggccaaggccaggggccccaggagcagttcggccgcgtttcagctccagatgctgcagatcgtgtgcagtgacacctgggccgatgaggaccggtgctgtgagctccctgcctcgagggatggagagacctgccccgccttcgtgtctgcctgttcctgttcctcagagacccctgggcccccaggacctcaaggacccccaggcctccctgggaggaatggcaccccaggagagcagggcttcccagggcccaggggtccaccaggggtcaaaggagagaagggagaccatgggcttccaggcttgcagggccaccccggccaccagggcatccccgggagagttggcctccagggaccaaagggaatgagaggcctggagggaactgctggcctgcctggaccccctggccccagggggttccagggcatggcaggggccaggggcactagtggagagcgaggacctccagggaccgtggggcccacaggactgccagggcccaaaggggaacgaggagagaagggcgagcagcagtcccttgccaccctctaccagcttgtgagccaggcctcacacgtgtcaaagttcgactccttccacgagaacaccaggccccccatgcccatcttggagcagaagctggagccgggcactgagcccctggggtcacctggcacccgcagcaaggccctggttcctggagaatgggggcgtggtggccgccaccttgagggcagaggggagcctggagctgttggtcagatgggcagccctgggcagcagggggctagcacccagggcctctgggagtgacaggacattttctgcactgccccgaggaacgctgagccttcctccctgggtttgtctggacaccgagagcgaccacatcctggagaagccaggagaaaagctcaggaagagcctgcaggtggaaggagagggaagcagcggcctcggccaaggcccaccccatactcttggctctgtagcatttccaagttcagataaacccctgagtgctcacccaaaaaaaaaaaaaaaa

SEQ ID NO: 383 - DNA, 425 bp, Homo sapiens
  misc_feature (109)..(109): n is a, c, g or t.
  misc_feature (278)..(278): n is a, c, g or t.
  misc_feature (294)..(294): n is a, c, g or t.
  misc_feature (319)..(319): n is a, c, g or t.
  misc_feature (330)..(330): n is a, c, g or t.
  misc_feature (387)..(387): n is a, c, g or t.
  misc_feature (402)..(402): n is a, c, g or t.
  misc_feature (417)..(417): n is a, c, g or t.
tttttttttcccagtgaaagggtcctttatttccacgttcaacggaattggtctgtgctgctgccctacccctgcccctgtcagggagccacgggagggggctgggccncagaggtgcctgacttcccaatgccgaggccttgccatctgctggaagagggtctgggagaggggagggatgccaagaggaaatgctgaggagtcctgggcagaggccagcatgcgggcctggccacagggcgattcccagacaggacagactggaatggcagccaggnttgcacaccctgggtnggcctcccgcatgggcaagtgggtnccgcaggcttnggtctgggaaagcgtcaattaaaggtcaactggggttgccgggggcacagaggcgtnctcctgggtagcctnagcaccctgaacctnggcgtttt

SEQ ID NO: 384 - DNA, 379 bp, Homo sapiens
  misc_feature (13)..(13): n is a, c, g or t.
  misc_feature (230)..(230): n is a, c, g or t.
  misc_feature (235)..(235): n is a, c, g or t.
  misc_feature (238)..(238): n is a, c, g or t.
  misc_feature (242)..(242): n is a, c, g or t.
  misc_feature (292)..(292): n is a, c, g or t.
  misc_feature (301)..(301): n is a, c, g or t.
  misc_feature (328)..(328): n is a, c, g or t.
  misc_feature (352)..(352): n is a, c, g or t.
  misc_feature (371)..(371): n is a, c, g or t.
  misc_feature (376)..(376): n is a, c, g or t.
cacttggtataanttttatttgcatgtgtaaaaagtgtatataacaggaaacctcttaaaataaaaacatagtaaagttttaggaaaaatatgaatttagaaaatgggttgctttttcagatcacaaaaatactgatatatgtgtactaaattaccttaaactgttgaggtgttagagaaacatttttcaaaaaacaaaaaaagttggaggttggaggagacacaaaatntagangantganggtactgatatatgtcacacatgttttaaaatgaccacacagggcaggantctacaaanggattcaaattctttaaaattacaggnattgctaggaggattcccctaatnggtgttaatgggccatacntaacnttc

SEQ ID NO: 385 - DNA, 417 bp, Homo sapiens
  misc_feature (353)..(353): n is a, c, g or t.
  misc_feature (365)..(365): n is a, c, g or t.
  misc_feature (377)..(377): n is a, c, g or t.
  misc_feature (390)..(390): n is a, c, g or t.
  misc_feature (404)..(404): n is a, c, g or t.
  misc_feature (415)..(415): n is a, c, g or t.
ttttttttttaagatccttaaaaagtatctttaattgatgccaaatatgaacagatcgtaaagtgacagaagcaagtaaaattgcatagatgaaaactatgcgcatcaattaggttctcaattcataacattcaatgtccttgacctgacatattacacagttagagaagggagaatgcgcagtaggtgaagatgaggacacgtccttaactcaaggtgggaaggcaactgggcaaacttcaaggaaataaaataggcgttttttcaggcttaaatgggtttgttgtcctgatgggtggcactttaaattaatactacttcaatttttattttttaacctcagtaatactttntctttactattngggggcatgtcncctgggggtcccntgttggtctacttnccatctgctgnct

SEQ ID NO: 386 - DNA, 457 bp, Homo sapiens
  misc_feature (283)..(283): n is a, c, g or t.
  misc_feature (423)..(423): n is a, c, g or t.
  misc_feature (432)..(432): n is a, c, g or t.
  misc_feature (446)..(446): n is a, c, g or t.
ttttttttattctaagaatataagtcatttaatactgttaattttatagcacaaaataaaacaagctatgatccccaaaaataattttaaaagcttacacagaaaatattattgcctgaagtttatgatctttaagttacaggtcaaaagagttttatgttgttgttgttgttgttgttgttgttgttttaaaacacacagtgaaggaccgtctaaggaaggcaaggccactgttcctcctgtaggggacaacgatcctgtctcagaggacctgtccttctgnctcctttagaaaacagaaccaggcacagcgttccacaccggacaggcagttactaggggggcatagtcctccggttcggcagaggggtgggagttgagggcagagcttcagtgggtgttccacaggaaaggcattagttnttagggtantgtgtttaaaacantcaaggatttc

SEQ ID NO: 387 - DNA, 31737 bp, Homo sapiens
gaattcttttgcaggtgaagccaataatcctcccaggctaagccccaacttttggacttgcccgtcctgcatcactagccattagtcatcctaaaccttaatacattctaacatacatttcaaaggggtttggtgccaacagacaaggcaagcatatcattgtttgtctcataaaaacagtatcagaaagactgaactaaaggcagtgttagtagtccataagttacgccccctccaagaaaacttttatgccattgattctaattgacaagttccattagaaaaatgaggaataaacaactataaatataactgcagcaactattgcctttttatactgtaagtaatgagatccaaaaagctacgtacacacaaaaaggtgatgctcatgctagaattttctcattgtcttcaatttcaaagacagtccaacaatttaatgccgcatgagatattattcttaattgcataagatggaaataaaattcctcaaagactgtaaccgtaaaatggtcaacgacagaagaatttcctcactgaaatcagatgagagatcactcttaattgcataagatggaaataatattcatccaagaatctaactgtaaaataaccaacaagagaagaagttcattgctaaaatcagatcattctgtaataacacaaaacttttttctttgtgaatatgagagaagatgaagggagaaaaaaaataatgagaacatacctatctagagattgacaactaggaagaacggtaaataatttctccccaggtggcagtagtttgaatagtcatgcttagtcctaagtgaaacctctttgacagaaacctgctctatttagaacagctggataccagccctagagtatcagatcgtaataatgaaatgtcattattatgccggtggtgatacaggtttctctgggatgggagcaaaggagaacggcctggcagtggaataacagatgtaaaaagacacagagaccacggcctgtctgacgccttcaaatcaattcaagacaacaaacatttctagagtgtatgttacatgctaggcattctgccactcccataactccaaatgtgggtgaagcccaaggtccagtttcagcttcttcttttctccctcctcatacccctctggtgtccttagtcttgcccttcactgtgaggaacagagagcatgacttcacggcttcaatatcaacaaatgcggagacaggcaatttctgcctttgcttcaagagctgtgtctctgtgatgctcctggccatctcatcatgcccacaggatggctgccacagtaccatcaacaagtccacacaaaatcttgcacttttcatcacccagaaaaatttccttttatgtcgctgtggttcttctggctctttacttccctgaagtagtattaaaaaacacatcagtatcatagcctaatggtggctatgttgatgcttaaccttggatttggccacataacttgctttggccaatgagaggtgagaggaagtgatgtgagcagaagcttaaaatgcccttttgcaatcggcctcaccctcttgtccatctgtaattcaccaagagaagaaaatgtccaaagaagtctctggtctaaggaggatgaaagacaccagggcagatgtgaactcaacttgcatcttggagtctacaatccagtccggactagccacatagcactcacatgcctgcttatccacagactcaggagtaagcaaagttatctgaggaactatgctttaggatggtttgttacacagaaccatggtggcaatagctgtctgatacatttttcttggcttcaatggtgcttccttgccatttctaggcccaaatgaagttaaaaatgcaaacaataaacaggagatacttaaaagctgatgtagcaaattactttccaacactttccaactcccctctacaaagatttccaaaccagtcaatcctactctgatctctcagatacaaaatcctccaaatgcccgctaagtatttcactcagacatgtcccttctttatatcaaactctgggcatgtgaaaacgattccactccatctctcacctcagaacttgctccaggtgtttttttgagacggagttttgctcttgttgcccaggctggagtgcaatggcacgatctcagctcaccgcaacctccggctcctgggttcaaacgattatcctgcctcagcctctcaggtagctgggattacaggcatgcaccaccatgcacagctaacttttgtatttttagtagagacggggtttctccatgttggccaggctggtcttaaactcccaacctcaggtgatccgcccatcttggcctcccaaagtgctgggattacaggcgtgagtcaccgtgcccagcctcggacttctttaacgaacctttattactcaagtgactactactcaacatgtcaaggtaaactttgatttctctattagaatgcacatatcggataaacatttgaaggaccatttactatattcatttatttaacactgacaagattccagacactgttctcaattcctacctgcatttcatcctataacccttatagcagaagttcttaaagtccacagaatgtattaccttcttcataacaatgaagaacttaatggttaattggctccagctagctaattggtctggaatataccagttattggcttccaaaccactcttacactgggccaagtgtttcatgtgaaatacttcattcaatctataacatcacctactttttttttatcagatcactaaatggaaaatgagacagattaagttttagcgatcctttaataatcacacctttagcatatgtttcttaagtccaaaaccacttatcctctgagccaagtattgtatatggattatttatatcaatccatacacttacccctttttgtcaaatcacttaaaagaagatgagagagtttagatggtactgattctttagtaatcataccactaatgtatgtctgaatttctgaccccactacctatacccaaacaattttcaaaagtcttccttggtttcttctcattccaaatcatgctgcattttgccccagaattaaactccttgaaatactgccttcatcatcacagtcttctcctatcctgttaccgccaatgactcacattagaaatacccagtttattttgatgacacatttgtcaaaagccatagtcctggggctttgctctgtaactccaatgggacatgcctataagattccatcacacacttaatatccttttaagaaattcactgacaaagtgggtggaagtagaatgacaaactttcttggaaactccttaactcaaaaggtgttggtggtttcacagcccactctgtgtatcaggaaagtccaattttcttattgaagggcttcaagaaaataagcccatcccagttcaccataaaactagttctaacaagatagctgattgagtcttgagacagagtggttgtcacaaggctgatatgagacctgtatgtccaacaatggggtgacattgcatttctgttctgactgatgagacgtctgttccagcaagtcagtgtatgtggcgtacttttcattaagaattatgaatatcattcttgtattgccatttttctttatgaaatgccctcatgatctccctctctcgcccatccttcaaggcaaatcacacttcctaagtctagcatgaggtctgacctccccattccacccctgtataacccatgagaatctcttccttccactgaaccctcataaatatgctggtacctatcatgacttccttgaaatactgttttctgcacatgcttttccctttactccacactagcattttgcaatctcaacactattgacattttgagccaggtaattctttgtggtgggggctggtgctgtgcactggagaattattagcaccgtctctggcctctacccactaatgccagcagcactgcctccctggttgcagcagtgaaataggtctcaaggcatggcctagtgtcctctggcggggggcaaaactgtcccccattgagaaccactgctctggattatacagttcttgaggactgagatgatattcaactcctccgttcctatttcatgccactcgtggagtgtccttcacacagaaagtgctcaatgttagggcagattgatttcacattctcatggatccatcttaattggagggttttgttttttgaaacagcccagcgggtagttgttttaatctgccattaagtccacatcatttcacaaatgactgcttaaaaatgcacactacttaggtatcaattgtgtttgtgcaggatacagaattctgcttctcctaataggatcatcttctgaaaaggcaatcttttattttattttataattttttcagtgcctacctagaattctgtgctattctctagcaatcatcaatttccagagaggttatttatcaagctatagagaattgtgatgatgctgcaaagaagtcacaatgacctacaaagaagaagccagggtaccagagagctaaaagaataatgaactaaaaaaaaaaaaaaaagaagaagaaaatacagaaaaccaaaaattagagtgaaaaacctgttgtgatcatccacaaaatagatgtacttatccatagacagtagatgtgctgatggattaaatatattaattgtttaaatccttggttttacaataaatcacatgaggttatttattccatgtgtggtattaacattattttgataaagtaataatggtaattattagagacccaagatacataaaaaagtgatttccaaacataaaaagtaaaaccacagggctacaactggagaaaagctctgcatttgattcagttcaacaagatttctgctctgttttaagaaatttatataatatcctatttgatgtaaaattgaagaaaagaatgtaacttatccttaagccaactttttaaaccaaaatgttgtacaaggattcctgtggcatttcagctgcccttaaattttaataatactgataaaatattctactatccccagtcaagtaattttttatctttaattggtaagccctcatttattatttctaaagcataaaaattctaatatctaggatttataacttacccaggcaatcgtgactgcaaatgtatttttaagtgcactagaaaatagagaaagcaaatgaacactagggaaatttaagtttggactacaatggaaaaagagttttttacaacaaatatatcatcgactaactatattatgcctcatgagtgaaaaaatttatctccacaattcctggggtgataagaaaggcttttcagggaataagaagaaaataagtcagtagaggagacccatgtctttccaatatggaatttaccacagatcatttcaaaattgacacagaagctaaacctgaaacacggcatgaagattcagtgaaatataaatattacatattgatccaaagatgatcaagaaatgcttttcactgcaggcatttttctttgtaaaataagctttactagaatattaaaggggaaagggggcaatgagctcacagaaaacaaaagccacgattcagaaaacgcccccactgatactgacagtggttatgtacatggcatgataaaaccattaagactaaacccccattcttgtacaatggaaaatcaagttttatttctaacccactgtattaagctgaataatcgccacccgaagatatcaggtcctaatccctgtagtctgtacatgttaacttgtgagagaaaagggtctttgtagatgagattcaattaatgatcttcagatggggtgattattctggattatctaggtgggtccgaaatattaatacaatcacaagcgtccctataagagagagcagagggagatcagacgtgtacagaagaggaaaaggtgatgtgaagatggggacatagattggaaggagtcagggatgtggccacaagccagtcaagggcagcacccaccagaagctagaagaggaaggaggagacactcccccaggaccttgagaaggagataggcccagtagcacctctatgtgacttcagagttctgtcatctagaactgtgaaagaataaatgtcgtgctaagccaccaactgtgtgacaatttattgcaccaaagaacatttataagctcaccatattttctgagtgtctgcttcctaatccatcccaacttctgctatttaataataaaggaaatgatgataatgccacataatagcacagcaccacctaccctgtagcagcatttactgtgtgacaggcactccattaaacacatagctatgttgcattctttcaccctcatatcacaaccaccttacaagtgttagtatctctatttcacagaataggaaacagagatccattgtcacacgagtaccaaatgacagagctgtcagaactcagaaagctgattccggggccctcttctataaccactctgctacactaccctgagcatcattctttatctcaaggagaaaaagcttgggtctaaaaaacaacagagacatgtatattgcattaaatttaggtatcaccaatattaaaatacattcctagtcattaaagatttttttaagaagtaatacatgtatgttggtctcttcatttgatatttgattcttatgatccattaagtattgatattaatagtgagcctaatattttcaccagaattaacagcaaaaggtagctgtgtgtgacatcacaggtgggatttttttcaagactaatcttaattgataaggcaagaaaggcaatgatttttttggaggaaacatggctaaaactctgaaattcaatttccaggaaactggtggaagcataaattaatagaatcaactattaattatttccttctcagtgctcaaagtaaggtatagacagtaagatctagaaattgctattcatccacccatccatccatccacccacccatccaaacacccatccatccatccacccacccacccacccacaaatccatccatccatccactcacccacccacccacctatccatccacccatgcatctagtcatcctttcatccgtccaccaattcattcacccattcatctatgtatccatccatccgtgcatccatacatgtattaatcctgtactgaaagcatcttgaactaatgttgtctgaaaagcaatatctaacttcattttaattaatacatagaggatatattatgacactacagtaggggacaaatttatcatccgacatctccgcagattaagtttagcttcagaggagtgtgtcttactaaacaaaaacacaaagatatgtaccctgagcatgtggataagaaagaggttatctcaaagaagcaacacctattaatgctgtgttaggaaagtgacttgcctggagggtcatttcatgggtagtgaaaggaagactccaagcctttcctagcagacctactatagatatcatcaggtactagggggtcaccaggccatgataagcaaagaggccacagatggggacccagaagaaaccaatggcaaggcccataactaaaaaaacaaaaaaacaaaaaagcaaaggcacaaccaccactttccaaggactgtgttcatctcagcagcaacataagaggaggcaggtaaaagaggtcttctctgggctgctgattatgtttggttcactcgaatgttctaaatggcattcttcagagtgactgcaggaattttttaaaagaaggaggggtggccaggcatggtggctcacgcctgtaatcccagccctttgggaggccaaggagggcagatcacgaggtcaggagattgagaccatcctggctaacacagtgaaaccccgtctctactagaaatccgaaaaaaaaattagccaggcatggtgatgggcatctgtggtcccagctacttgggaggctgaggcagaaggatggcatgaacccgggaggcagagcttgcagtgagctgagatcaggccactgcactccaccctgggcaacagagcgacactccgtctcaaaaaaaggaaaagaaggagagtcattttaattccttatgatatgcatacttccataagagatggaccataccccttggcaatgaagagactttcctaaagtctttctgaacgaaagtccatgaccgtctcattgaaggtcaacccatttttatgtgctaacgcagtactattctttatttataagagcatggaactacctttttttttttttatttttgagacagatactcactctttttgcccaggctggagtacagtggcacgatcttggcttactacaacctcccactccaggggtcaagcaattctcctgcctcagcctccctagtggagtagctgatattacagacacctgtcatcaagcctgactaattttttttgtatttttactagagatggggttttgccatgttggccagggtagtctggaatgcctgacctcaggtgattcagcctgcctagacctcccaaagtgctggaattacaggcaggagctactgggcccggccaaaactacctgattcttgataaagaagtcaatacagacaatttcaatccttaatattgtctatacctggagccaattattttacttttaagagccattgaaggaaaatggagaagtgctcagccatctctacttacaaattttcatctcagcttttaactaggatggaaaaaaaaaagactaaagcaatattagtgtaaagagctggggggtggcaagtgggatggtgtatccaaaaatgttgggttactatgaccattaagtttatctttttgaagaatatttaatgacatggaggaaaatatccataataaaatgtcaagcaacaatagcagggtatggaacatatacagcttaagcccaattaagtgcctgagttctcacatacatacaggaaaacataaataaaaggtaaatccatcagaatgatgttattaactattctagacacaggaatgacaagggaattaatttatatatatatatatattttttttctactttccaagtttttctcaattagtacatagtattttataagcagaaaaacaaaaaaataaaataaaataaaaggtagtgtccatgaaaataaccatagaagtttaggagacatttggctgctcatttctaaaacaggttaatttttgggattgtctttgctttgcttgcatcagcatgcctctttctagaatgccagtcttaaataggctaagatggcattatcttcaattccaaaaatgtggaatttgtgataattctgatgaacaaaactctgatttttttttttaccttctgagctataaacattgtcacagtttgagtcacggtatatgcaaaggatgccaagtaccttctagcaatagatgaatcatgcgttacaaatggattacgtttaaaacaaatgatcagcttaaacattcctgcctgccaccaggtgccagtagacactgtacatattctccaaaacagtaacttaaaaatggagggtggtcccacatgggctttgagaaatcaaacaagattcaggtgagagaggaatgatgagctgtaagatggtttcctttttaatatggctctggcaaagtcaccatctccttcttggcttctgaatttcttcccttggtagacaaaatgacaaagcaaatctaagaagcaacaaattagccattcttatgttaaagagaattagccccaaaggcccaaggcatgtgagtagttcaggctcctagaaaagaaagttctaggtatttgcctaatggaaaattgcaatcaaaatcaacgttaggtttgccttttctggacatttcataaacaggaatctcataataagtagtcttttgcagctcacttccttcactttgcataatatgtgcataatgttttccgaggttcatctatgtggtgtagcttctatttgtattctgtttttttgttttatctctttgtttgttttggctaaagtgtattacagtatttgaatatagcaagttttgttgactcaccagttgatggacattttgactgcttacacttctgggctattttgaattatgctgctaggaacacgatagattagtggttgcctggggctgagggtgggaacagagattgactgcaagatgggcttggaggcgagctctctttaaggagaggacagtgttctaaaattagactgtaaattttctaaagataattgaattgtaaaattgaaaaaggtggattttatgttatataaattatacctctataaaaccattttaaaaacctactttgaatattaccttatttccaagatagtgtcacttgactcttggaagaaggtatttattctttaagttctaaaggtttcccttaatattgcaatataaagagtactgatgaaggatattctccttatacttaagaagcgtattttaaatggaaccattaatcactgcccattgcatacagatagcaaaacatcacattgtatcctacaaacatatacaattattgtctgtcaattaaaaataatattgtgtgtgtgtgtgtgtgtgtgtgtgtttcaactgggagaaacctatgatgtccctaattagaaggctatgactgttgctattcaggatagagtggacaatcctgctaggctgaggaccagagtgttgaaattctctagggtcaaggcaagaactgggaacagaggaagaggacaataagctgagaccacagaggctgagccccaatggctagggcgaagtaatagcccagagtcaaaagaaaagtttcttccaaattggaacagagcaaaaaaggggaatttcaggtaccaaaaagtaaccctgtggcgggtggacctcaccaatcctgtttcatctttctagggccccagggagactctttcccatgctactctgtggtgaaatggaggtcacatgactggttctggccaatggcatgcaggtggaagtgaggaatgtccactccagacttgacctccacatttcccacccccagatccttagctcagtggctcttgcttctgtctcttggttggatgattcaagggtgactgaagccaggaaacagcagagtcacaagatggaaggagcctgaatctgcttgttatcacttgatctagaaaacttgttcatggctttgtatgaataaggcatcaactttgatgctgttaagtacctgaaaagttgggggatgtttgttacagcatcaacctagcctgactgacaacaacagtaataataaatttaataagttataatattattgtgtgaccgtgatacatcagacatatgttagatatcttacatatgtcatctaatttaactttcacaaaaatacttatgaagggaataccattatcacttctcccatcttttgtcatatgagtactgcagaatgaaagtaatagctcacagtcacaaaactggtaactgtcagagacagaattaaacccacagggttcagaccccaagcctcctcttcattcttaggctgcatgacttggatggaactggcttatcccactacccactgagcaaatattgcatgttctcagatatctgacacacagtgctactgttcatctcctaaatcaccaacaagtgtccaacttcgatctatattttaaatcccttaattgtccaaaagaggggaagacactgtggttgctcacaattatgaaagtcttgcaagactgaaccaagggaaagcattagaatggccctgaacactctaagaagcctgcagagaaattcccagactccatcactttcttctaaaaaaaaccccaaatgaccccaagttacttccaaccccaaccctgtcctacaagccaggacacaaggcttagaaaagatgagcatattctataataaaaaccaggacctactctaaaatgaaaatcacgagacacagtttaacagctgtgattcaccaagtcaaggtaaaggtaacacacttggaaatcgaggcgaaaatgattcaataaccgttctataaaattcacaagggaacaatattatctgaaagacaatgctttacataaaaatgagaggtagataaaaggagagggagagggaagacgtggcgtgagctgctggaaggggtgggagggtggagagagagagagaattatcctgaaactaacatccagatcaacctgcctgaaaggaaacttttcctgtgcagagaaagatgtcctcagccgttgacgtgcaattcaatgattgatgttgttgcaaatgacaccgttgtaagacttagagactgaagcaccaacttaaatctgatcatatgaaataaaaactgggtttatacagtgttaaagataatttcttagaaaaattaacaaactcttactacagacctaatgatgtcacaacattctttctaagaaggaaagatagtgagagggaagaaaggagaaaggaagaaagaatattgcttgtcactagaggtttccactaaatgcatttctgggtgcattttttttttttttttttggctgaaagagggaagattaccctaataaattccttcaggccgaaactcatactgctgttcagaatacttgaattataaggaaggaaatcagaccaccctgctacacacataggaaacaaaatgcagccaatgcaacagtcacaccattttgggttttaattattagaatgtgaaactctcaagaaatgtgatcaagccaaagcaatcagctcccaccctgggcctccgagagccaggcctactgcagtgcactattcgtggactggccaaataatcacctcccaggaacggacaatctggccccacagattcccactacagctgccccggcagatgagggcaagggcagctgtggatatgtgcaggatttgggcaggggtaggagtgttccaggacaataaaaataatttatatttttagtacagacaggtttcaccacgttggccaggctggtctcaaattcctgacctcaggtgatccacccacctcagcttcccaaattgctgggattacaggtatgagccacgctgggcctggtggccagtgcctgtaatcccagctactccggagggtgaggcaggagtatcacttgaacctgggaggtggaggttgcagtgtgccaagatcacatcattgcactccagcctaggcaacaagagcgaaactctgtctcaaaaaaataaaaataataaaataataataataatttaaaaagtagaagatacaaaaccatcacacccaaataaatttgttctttccaggctgccttgtgagaaaaaataaagccacacatggatgctaacgacttggttcagtatgaggacatcgtgtacaggaaaatgctctgtggtttttacaactgtctgcatgtgattatttggtggggaaaggatggagacccagaggcctacacccactgaaggtgcatgctgttttgaggacagagaaggggaaagtgagagagtgggtccggagactccagcctttagatgttctcataaataccatttctttgaaagcttgtaacagcctttctcagaagtcagtattatacccattttacagaggaagaaaatggacacagatggtttttggagcttggcaaaggtcaaactgctagctagtggtggacttggggtaaaactgacatctgaccctaaaactctataggaggaacctgtacctttagaataggaggctgacaatttcgagacggaaaaaaatccctttgtgcctgtagggaagattggccacacagtcatccctctgaaactcttcatctcagactcttcttacacataagaacacttaaggaacattcctataagagggtgatggtaacagtacaggctttggtgttcaggccacccagggttcaaatcccaactttgctattttgacaaacactgttaacctgggcaagttaattaagattgatggaccgggattcttcttttaaaacacagaaacaataatagtctctatattaaggtgttgctgtaatgttagatagatcaatgtatggaaagtatggaccctactatagcaactcaataaatattcgttattatgtgacaaaaaaagagaatccaaactgatcatcttgaactttgaatgcaccttcaatcaaagtctattaagtgcaaggtttgtgtttagtgtgtggaggaagctcaggtctaccaaagcatcacattagaataaagcaataagccggccgggcgcggtggctcatgcctgtaatcccagcactttgggaggccgcggcgggcggatcacgcggtcaggaaatcgagaccatcctggctaacatggtgaaaccccgtctctactaaaaatacaaaacattagccaggcgtaatggcgggcgcctgtagtcccagctcctcgggaggctgaggcaggagaatggcgtgaacccagaaggcggagcttgcagtgagccgagatcgggccactgcactccagcctgggtgacagagcaagactccgtctcaaaaaacaacaacaacaaaaaaaaacaacaacaaaaaaaacaataatgcaataagcctgcatcacatttcaattaagctgaagttgactactttagagcatccccaacattcaactctgctattttataaaaagaataatatgtgctcaacattcctaagtcacatcttccatgcatcttgttttatctagagatggctcctggattcagaatgaggctgttacaccaccttcttgtaaagatgatgattcatacccattttattgtttgctatgataaatgacatacagagaaaagaactcctttaatatggaagtaaaatatttgttattcatgttctcttaaattagggtgaggtctttgagaaaagggaaggatgcccggagttgggttagggtttattttatttgtcttatttcgtaaaagtcacagagcactttcctgtatacagtctcctctcaaaatcaaggacagtcatgaattttgtttgtgactctgtttgtgaagtgacagtcacaaaatgtactatgctaaagtgaatacttcagtgacagcttgttgtacagccactacctctatcaagttccaaaatattttcatcacaccaaaagaaaaccccacaaccattaggcaattgctctcacttccccatcccctcagaccctggcaatcagcaatcagcattctgcctctatggatttaattcctctggatattttataaaaatagaatcacataatcaattgactgaattcttctttaaccatgaagacactcagaactaacctcctgtggctacatagacaacaggaccctatcagatgtcaatttcggtgtagtttgtgttctcatagaccctttactgacgtcatcatgaaatcatctatacaccaatgaaccacaagctaaaaagcaggccaatgtttatggctcaactcacacaaatggcaggccctcttaacactttctttggccaattttcattttgactgaaccaaatggagttatccattcccccaggtgagtgctgcctaataaagaaagcaaatcgggttcgacctattttcaaattctaaaatgtgtcgccccctggactcatacaacatgacagactctcaaccagatggagaaacattctctgcctaataaagaaccaggaactcgactacccagcccatcctctgttgatatgaatcatgaattaatagtatcagaactacagaaggtggcttacgaagtgcagtccaggccgtccttcaacgaagccacatccctcaacccaagccacatccctcccaattatttaccagccaatcagggttggacacttagtgctcctggaaactgatgcacctggctccacttaggaattttccgggatgggtgtgtctcagagtcccctgaggaacttgttagtaaaacagtgattgattctggatttttagctggatgtggtgtctggacatctgtacccgtagtaagggtctcagatgatgagctttttggtggaaatgaatgtataaactctgaaggcatgcagagaaagataatacagagaatgtgcatggcccttggcagcagccagaaacaaaagactgaagcagggtttctgcaggactaatgcttctataattaattgctcttgacttagaattattccagcgtccaacttacaaggaactcaaaaggtgcttagtgctaaccttgaacctgggcctcccgaggctggggttaaagacacaaagctaatttaggaggcagtgcaagtgggcattgatagagaggacaggaagaggcttaacaggcttgggggctcaaaggttcacaggagccagaggagaggggtttgtggcaggcggtggcgtttctattctgggtccatgcaagggacttgccaggtgaccttgggcctgtcacagccccttggcactgctgcctctccatctgtgaaataaaggtaccagtgcctgtcacacaggccctcccagggtggggaagattaatgaggtaaagtttgcaaagtgtgtagaactccaggcaacgaagggtagcaagaggcacaaagtaaatggtgaccgaccccttctcctctcaagtacatgcacacttctcttgcctttgaaaaatagcataaccccttgctatgccaagtgagcaccagcatccgtgggagcttgtcacaaatgcaaaattgcaggctccatcctagaccaagcaggggccctgatcatctatggtttaaaagccctccaggactcattgatgcttgctaaatattccagcaatggcaaatcgcaaaatagccatgcacaaatcagacacgtcccccacttccaagggacttccactccaccagtaagtacggtgatagaaaataaataaataagaattttggagggtggtaagaaaaaaaaaaaaagaagagaacacagaccaaagacacagaggcagtatagcacaggagttgagtctatgggctccagattcacaagccctagggtcaaatcctagcttagacacttattaagcacttgagtcaatcacttttcctcctactgactcatttttctcatctgtgaaatgagaataatgaaagtgaggtctccctgtgcagcagaggttcttatactttaacattcagaagaagcactcagagagcttgttgaaagcacagattgctggttcctgccaccagagattctgcttctgtaggtttggatgggcaccaagaatctgcatctctcacaaactcccaggccttgctaatgctggtagtctgcagaccatggtttgagtggtacttctctagagtggcggcttgcaaaattttaatatccacccaaatcacaggggtaggaagaaaggggggttatgttagtctgtttttatgctgctgataaagacatacatgagactgagtaatttataaacaaaaagaagtttaatggactcacagttccacatggctacggaggcctcacaatcatggcagaaagcgaaagtcacgtcttacaaggcagcagacaggaaagaatataagaacgaagtgaaagcgatttccccttatcaaaccatcagatctagtaagacttactcaccaccatgacaacagtatgggggaaaccacccccatgattcagttatctcccacgaagtccctcacacaacacatgggaattatgggagctacaattcaagataagatttgggtgggacacagccaaaccataccaggagtgcagaggggtgagccgtcattaaaatgcaacaggtggttcagtaggtctgaggaagggtctgggacttggcagtgccaactccttcccagcggaggctgatgacctggccaatgaatgacagtttgagcagttgggttcatgtatttgacacagggtagataatcaagggtattatctattttagtatttttatagctctaatcctttatttcgtagtgacaatgatggtaaccagataaccaatggttagagttttaaacatcggtacatgataaactgtaagattgatgccactgtatcaaacccaatgaaaagaaagtgttggttcacagaatcccaaaacttccaaaccaaagatccagaatttcctcaaaggccatcataggagtagagaattcacaaagcctcttatttcagccaggaattccaaaatcattgctaaaatatgaactatccgcaaagttctacaggggatatgcagggcatcagcagtcctaaagagatgtgaggaaatgctgtcacggctacacaaaaccccccaaaataaatgtcgagagcaaacatagtggggtgcacatggtcctaaataatgcaataatgcatctggggaacgattttcctgaaggacttatttatatttgaaaatttcatcttcgtttcctttccttttctcctcttttctttgggacagaacttttctccttcccactatggaataattcagcaggacaatgctcttctcctgggatttccttccccatcaggttataaataactatgccacaataattaagagcatatacaaaaatcaatgacaaggtcgtttaccatgaacaagccatgttctgtttccatggcaacacggagtcaaaggcaaagtgacacatgatgagacttccattgtatctccatcgtcttaaactctgaaagggccacctttggggcaggccaggctcttccccatcgtggcctgggtggctgagatctgggcccaagctccaaagggagaagactgatgaccagactccactgggagcctgtgggaaggcacgccaggagatagacaaggcaactctctcactaactgtgggcctaccttcatatttgtcacagtgaaaaccaggcactgttggtaacgatcccagactcaggtgggtcattagcctgcccctctgaattacccagttttggactttctctgctgtctcaactccatgtctttttttttttttctttttctttccatcgcagaagagagaatggaagaagaactaatcagaggtaaaaaagcacggtgctggctgcttcccaagttctttgcacaggcagaggctttatcaggttcaaacttgttagaggcgtctgccttcctagatgaatggcagaccgagcatttccacttgcttccagttctgcctacctttcccttggctgtgaaaacccagaaactgaaagagaaagagtgaaaagaagatgctgggactgtctgacctgcaaggccatcccccaagggtccaatcagctccacagaaagtgcacagacacaggccgtaaaaagagtgaggtgttggagtttcatgagctcctactcttagaaataagggagatgtcctaaatatcccctggtcacttacaaacccatgaaggatttagcatcttgacttcacttatttgtatattcaccctcaaagttactttaaatgttttacttggaaaggaattccaaatccacctgtttatttaaactttattaacaccaatttctgttaataacctccagtaatgctgaggatgatgatatatgtatgggcccatacttattaggtgctaaggaatccactgggtttcatgtgtgtttcattttatttgttttgtttttcttgagatggagtatcactctgttgcccaggctggagtgcagtggtgccatctcaagtcactgcaaactttgcctcccgggttccagcgattctcctgcctcagcctctcgagtagctgggactacaggcatgcaccaccatcccttagtaacttttgcatttttagtagagacagggtttcatcatgttggccaggctggtctcaaacttatgacctcaggtgatccgcctcagcctcccaaggtgttgggattacaggcgtgagccaccatggccagcccctcctataggtataatttaatttaatcctcacaacaacactatgaggttgatactgtcattatttccaatgtgcagatgaggaaactgagtcataggataagatgcaatgcctgtgatcttaaactcccagcactggagaacttggaataaaaactagaaggagctgaattccagagctcttatctatgacctacctgcttcaaaactagccctttcttttatttctcctaaaataactcctttcaagcttccagtggaatgcttgctactgttggtattctaatgtctagtgagcatgtcagtttctctcttggtgactttagagagtgattaattctgcctttctctgtgagtccaagcgttttaggttttacatagaaactgttccctctttgcctaaatgcctccttgttgctgagaagtgccacctggggttcaaaagaaatggaatagttgatagacctcttctcaaaatcatttccccaatggtctctcttcctttggaacggtggctcagggaatgataaaatgcaaggaggccgtcaaagggaaatggctggtcttcctcatccatggaaagcacattttgggaggatctcctcctctgacacagatgagtccttgggacaaagctcaggtcaaaactggaaatctatttcacagtaggtttctcatgcacatttggggtcttttcaatggcaaaactgggacaagtcatgtcgaggaccactaactttaaaagtaaattagaaaccctccacagaacacagattacctaaaaaagcggcatgatttctcttttgcgaaagccagcaggggcgggcagaagaggaagaatatgacttctcaaacaatatacaggcagggcacaggggctccagtctgtaatctcagaactttgggaggcggaggagggagaattgcttgagcctaggagtttgagatcagcctgggcaacacagtgagacccccatctttacaaaaaaaaaaatgagtggggcatgctggaatgcacctgtggtcccagctatttaggaggctgaggagaaaggatcgcttgagcctaggaggttaaggctgcagggagctacacttgagccactgcactctagcctgggtgacagagtgagactgtgctgcaagaaaagaaaaggaaaagattacagaattcacagaccgtcccatgcccttaattacacaatacataaataccttttgttagaaaaattgtagacaagattaaagttgcatgtgatcactatccttaacccccattgcccctctaacctggaaatcctagtatattgagtatccttccagatctttactctaagcatgattatatactatgattttattattattaattttttaagagatggcgtctcactatacctaggctgaccttgaattcttggtctcaacagatcttcccacctcaaccttccaagtagatgtgcctacaggtgcgagccactgcacctggctatgatttaaaatcaattgcttctattctttattgaataataacatgttgctcgttttaattagtatatattaaaatcctaaaccatgaggacttaaactcatctccagatgcttgtttacctacagaccactcagtgaagatgacagtaattgcatctttttggggatagccaaccagttttcttgcaaaatgaagcaaacaaaagggtaatatttttaaacttttattttagggtcagtggtacatgtgcaggtttgtcatacaggtaaattgcatctcacatggttttggtgtatagattattctgtcacccaggtgataaacatagcatctgataggcagttttttatccacactttcttcccaccataggaattaaaaaacactatttttaaattcatatagaaccaaaaaagagcctgaatagtcaaggcaatcctaagcaaatagaacattctaaccatcaagttacccaacttcaaactatactacaaggctacagtaaccaaaacagcatggcactactgatacaaaaacagacacaaagaccaatggaacagaacagagggcccagaaataatgccacacaccaataaccatctgatcttcgacaaagttgacaaaaataagcaatggggaaaggattccctattcaataaatggtactgggataactgactagccatatgcagaagactgtaactggacctcttccttacaccatatacaaaaataaactcatgatggtaatttgtattatggtgaagttataacatgttgaacacgaagcacgtgaagatgtctagtccacagagttaacattttcaatttattagaactttccttcctttaagctggacttgcagcaggctagggaaaacaagaaggtaggagacatagaattaacagttcgcttgccagggattcatcccagccttactccctgtgttcccatggttgctgtctctcagtttcaccatcctcagggtggggatattacaaatgcctactgcagagggcttcctacacttactaacttaatgcatgtgaagcatttagagcttggctgccatgtgactagcactcaataaataaatcttagcttttattattctcatgataagcatttattagttccctcacaccaagcccatgtaccagttgggacttcaggctgaagaaaatagagaggagaatgtggaactccagaaggattgctaggtactcttaagtatgtcttcaaggaggacggatggataggtggatgtgtgaacaggtaggtagatagatggaggaatgagtggatgaatggacagacacatagatgcatgggtagatggacagatagatggggaggtagatggatgaataaggaccagtagcagaagcaaaagtaaaagccattaaaacactagaggaccatttattcaacaatttgttttgttttgttttgtttttttgagacagagtctcactgtgtcatacagggtggagtgcagtggcgcaatcttggctctctgcaacctccaactcccaggttcaagcaattctcccagcctcggtctcccaggtagctgggattccaggctcctgacaccacacctggctaatttttatatttttagtaaagatggggtttccccatgttggccaggctggtctcgaactcatgacctcaggtgatccgcctgcctcagccttcaaaagtcctgggattacaggcgtgagccatgacactcggcctcaacaaatgttttttttgaatacctaccatgtagtcagttgaggagtgaaaggataaagtgacaataaaatagatatagaccgctcaccctataaaaaagtagaaaatcctgtaaaggagttaaaaatctggtgacctctataaagagaaataagagtgtgttgagagagtatgacaatgtgctgcatttacatagggaagggggtcagacaaatcttcttctgacgaaatagcttttaaagacttcatggaccaggagaaaggagttcataagtgggtatcatagatgtaagagaatagggttatggtgactaaggctgggaagggtgtgggggtggagtgggaaatgaagacaaatcggttaatgggtgcaaacctacagttagataggagaagtgagttttaatgttccacagcacagtaaggtgacaatagttaacagtaatgtattatatatttaagaatagctagaaaagaagatttgaaaagttgccaacagaaagaattgatcaatgttcaaagcgatgaatatcttaaataccctaacttgaccattgcacatgcatgggatgtaccaaaatatcacatgcttcccatacatatgaacaaaccatatgaatcaatactttttttaagttttgcttttattcttggagcagaagcaggataatgtagtgaccaactgtgcaccccttctcttcccctctgctctcacccctccctccaccatagactacatttgtacagcttaacggatccaacaataagaaaagagaaagaggactgagtcattcagcggatttgtttactgcactaaggggccctggagctaattagagatggcaggttgtcaaaagaacagtaaaccctgctttcacaggtgtgttcagaatctgaagagtaaagatcaatatggtaacgtaatgcattagacttgtgaaacaaaactcattgatctacaaagtcatcagaatgttagatttttcccactgcctttgatcattaattggggaccaaggtttaccttttagaacctgctgactttggagccaaaagcatcatggttcatatcttggtttcaactttctatagctgtagcacattaacctaaaagactgcttgctgctacactcagaagagtggagatgatgatatgtgatctgcagaatagcagcctcttaaagatgtgcatgtcatgatacctggaacctgtgaatatattttaccttacagggcaacagggaattaagggaataggtggaattaaagttactaatcatctgacctcaaaatagggagactattctggattatctctgtgggcccaatgtagtcacaagtctccttaaaacctagaagagggaggcagaagaatggagtgacatgatgtgaaaaaggactcaactcaccaatgctggctttgaagatggaagaaggggccacgagccaaggcatgcaggaggcctctagtggctataaaaggcaaggaaagggactgtacccaaagccaccaaaagattagtttcttattgctgcctacctcgtgatgttagcccagttagacccacttaggacttctgacctccagaactgtaagatactaaatccatattctttcaagccactaagaatgtgatcatttattacagcagccatgggaaactaatacacaatatttgagtttgtgtgttcttaagaggattcaatgacatgatttatgcaaagcgatggtgtcttaggaactactcagtggtcattgtcattcatttctataaacacccacctctaatattggccaatctttcacctacctttccagtgacttacccgtttgtgcttctacatccccaaggcctccaccagctaagaacatacacctgaccccgtactcaggtaaccaccaactaaatcattagctgataacacaaaagacccgccccagcaatatttgcattcaaaagacaaatgcattgcatcactctgcttaaaatctttaggttgttcaaagtctcccacagattttagtctaagatttacaatgcctttcagcatgcagtccctaccagcttctacaacctcagtttcttctccttccttataggccctctgtgtatatgccgaccatcctaaatgatgggatatttctttagtgcatctgaatctcttatggctctgggcctttgcatttgctgtttcctctgaccagaactgatgtctcctaatgcatgttcatctatccaagtctcattcattgtgtaagactcagctgaatcattacaagaagcttccctcaatatcctgctactcagttaatcgggatctacctcctttgttctcctggaatgcagaatccatccctcaactttagcaattctcgcagcatcttataaatgatcacttggtggtccttccccatcattactctttaatatcaatgtctttttaggatcatatatatatatatatattttttttttttttgagacagagtttcactctgttggctcactgcaacctccgcctcctgggttcaagctgttgtcctgcctcggcctctcgagtagctgggattacaggcatgcgccaccacacccagctaattttttgtatttttagtagagatgggatttcactgtgttagcgaggatggtattgatctcctgacctcctgatatgcccgccttggtctcccaaagtgctgggattacaggcatgagccaccgcgcctggccggatcatagatctttttgaggatctgaagaatgaaaccccttcttcaggaaattactcacacaagttttacatgtaatacctacagtctgcaagtcattgcagggggttcatggctccctgaaaagcactgaacctcagcataaaattcccagcattaaaatgtgagtgctcagaaggaaagcattccaccattctatctagtttatacatttgtctttggcatgcaacatactgcctaacacagagttggtatttaataaatgcagaaggaaggaaggaaggagaaaaggaaagggaagggggaggaaggaagggagggaggatgcatggatggttgaatggtggataggaaagtgaatgattaatttgtttattcatctttggaaaaattcagctagaaaatttcacctaataatagacaaatgacaattactaaatcacatcagagaacatgactaatcatacttctctggcaataaacactgtgtgacaaaaacgcatctgtgaaaatacccttattgacaacatgttccatattgttcatagtttcagaaacattcctgaggaaaaacagatatgatccaactgaggcaatacagctgagaaaaaaaaaatgaaagaaaaaaagtaactaagagggtaagttttctggtagagtaaatcagaataggttctatggccaccgttacagatgatgaggttgaaataacgagacggtgaacctcttctctctaaaattcaccttgtagaaagtttgttgtggctgctgtagaaattgtgaaaatatgcttgattagaataaaagttttacacacacacacaaacacacacacgcaggagtttttatacaagaaataagataaggctgggtgtggtggctgacgcctgtaatcccagcattttgggaggccgaggcaggtggatcacaaggtcaagagatcgagaccattctggccaccatggggaaaccccatctctactaaaagtacaaaaattaactgggtgtggtggtgctcgcctatagccccagcttcttgggaggctgaggcaggagaattgcttgaacccaggagacacagggtgcagtgagccgagatcacgccacggcacccagcctggtgaaagagcaagactccatctcaaaaaaaaaaaaaaagtaagataaatatccagccaaggggaatgagtttcctatgctgcatccatacaatggaacagtatatagttatttaaagtattacacttcggaaggacatttatagcatgaagaaattctcatgctatcttaagacaaagcaggttacagtgattccaaatttccaaatatgtgtatacacatagagaaaaaaggctagaaagtgttagcaatagttatctatggatattggaatcacagttgaattctgaacttctttttatcctatttctgtagatacatatacatatatatatatataaacgttaaagaagaacttcttggttaattaaaagcttgcatgcacatgtgtgctcgaaggcacaaaactctggacagacagatcatgtttcaatttctgcctaaggaaacaccttttcgttggacctaaattcccctaaaaatgtgccacttttcacctggcaggcgttctaacgtcataatacctagtgagaatgaatctatcctcataaatctaacttttcatctcatcatctaaatttgctgacggaaattggattactgtcaaatttgtctcttttccttttgggacattgtggatatcaatccgtctcactccacatcaccactcaatgtatatctacccattgtgagaagggttcctcttgagtgatgtgttgctacagctttgtgactcagttgccagctctgtgtttttctggctgctatacttggtctttctctaaacagcagaaagccttcaacaaggaaagaccctaaaccagaatgaacatgatgcattgtctctttcatgttacattcaactgaatggtgcttagggaagaggagcgtctttgagcatgattcagtttagcttaataaatacctgctgaatatctcttttgtacaaggtgatgcaataggcttagccacatgtttccatcccacacaaaagaaggtattcttcaaaactccatcttttattgagaaacagtaaatcatctccctgatatgagttcagatataatgaaccccaaccaagcatgcgcccccagcccagtcagcagtatagacttgggctccatttcacgtcaggtactaaagattcttcgttcactgctggtttatgtttaagcaggaatctaaaagaacactcaggcctcaatgaacggggatgctgttgtcacaggaactctcagacagtgctggtgaaaggactttaccaccgactgctctgcagaactgactcagagtggattaaacactatacagagtaactttgggcagcagaacactcgcatgaaaaatgtgagagatggaatgcacggggctgggtgaacagcaaataacacagtcggggaaagcacttagcatgcaaatgacatctaggggttcccttccaacaactcacttgcaaaattcaaacccaatgcatgtgcttgtctattactaggtaagtggtacctatacaccatggaatactatgcagccataaaaaggaatgaaatcacgtcctttgcaaggacatggatgaagctgggagccaccgtcctcagaaaactaatacaggaacagaaaaccaaacaccacatgttctcactcataagtagtagctgaacaatgagaagacatggacacagggaggggaacatcacacagtggggtctgtagggggctgggggaagagagagcatcaggataaatggctaatgcatgtggggcttaatgcctaggtgacgggttaataggtgcagcaaaccaccacagcacacgtttacctatgtaacaaacctgcatgtttggcacatgtatcccagaacttaaacaaaaaaaaagaatcagcacttctattttacagagataagatggagttcggaaaaaattaatgtttggtgaagggacccaactcttggggagggtagaatttaagcgccacgggctgcatcatccccttacgtgcatgtgcgtgcgcgcatgcacacacacagacacacacacacacacacaaacacacactgctacttctcctgcctgccttcaggtcatcaggggcatagaaccaagggtatcctaaaaacctgggtgtgagggtcgggcacagtggctcacgcctgtaatcccaacaccgggaggccgaggcgggcagatcacctgaagtcgggagttcgagaccagccagatcaacatggtgaaaccccctctctataaaaatacaaaattagctgggcatagcggcgcatacctgtactcccagctactcgggaggctgaggcaggagaatcgcttgaacccgctaggcagaggttgcagtgagccaagatcgtaccactgcacttcagcctgggcaacaagagcgaaaccgcgtctcaaaaacaaaacaaaacacaaacaaagaaagctgggtgtaagcctcaaagtcaggccaatgtttctaaccaaaagtcacgtgaaagaaatgagaaagtcttgccaggaggagaggtctggatctgcaagttgtggaggaagaacatgcacagtagcagaaataagcccctgaaggaaagactccccgccctcacccagtccccagcactctgcctgagacagctttggatgagtgaatgaatgaagcacgcacgctgaggacagaagtgaattctcacaagttgattggggaaaaggaaaccacttctgcaaatgaactctgatcactatcaagctctttttttccttttcctcacaagaaaaatagcagaaactgagatatcatctcagagcacttatctggccattagccacttcaagtcaaatagatagctcaaggtcaaaattacttaatcactcagggtctcagactccccatctgtggagttctaagacgtttgtcctgcaaaacataagaacaagcaagcctgggcttccccatgaagaggtgggccctctgaataccctagaatgcctgaccttatctcctaaccaaggaatcccgatagagcatcatagaaaacgagagagagagcaggcttactttttcaccatgtcactgtttttttttctttctaaactagcaaaccgttataaagggtccttgaccttttgaaagctaaaatacttcaaaaagaatgaggaaggggccaggtgcagtggtttttgtctgcaatctcaacattttgggaggcagaggctgaggaattgcttcagcctgggagttggagatcagcctgggcaacatggtgagactccgtcttcacaaaaaatacaaaacatagctggacgtgtttgttcatagctatggtcccagctgcctgggaggctgaggtgaagggatcacctgagtctgggaggtcgaggctgccgtgagtcacgataatatcactgctctccagcctgggcgacagagcaagacactgtctcaaaaaaacaaaaacaagtaataaaaataaataaggaggaaggaccattaaatactgcaaatttctgggcactgtgcaaaaacactttacacgtgctctctcaatgactgctcagagtgccctaagagggaggtattattattggccgtatttacagattgaaaagctcaggcccctaagtgcaagttgctcagggtcaaaaagtgttgagtagcaaagttgagactctttaaccgttatactctactaaattttctctcattttctaaaatttgacatcatttttgaataacaaaatcaaaaggagaattcccccaagctcctttgggagacttcttcttgacccatcctccaaataaatctacaggctttcaggcagccaattcttctgcttaaagattgccagtgtcccccggggttagagaagatgggaaggtgggtgaaaagggctatattggagttgagggattgagaccaaagaaggggggccaggtctggtggctcacacttataatctcagcactttgggaggccaaggtaggaggatcgcatgagcctgggagtttgagtccagcctgggcaacacagtgagaccccgtgtctacaaataattaaaaaattagctgggcgtggtggcgcacgtctgtggtccaagctacttgggaggctgaggctggaggatcatctgagcccaagaggttgaggctgcagtgagctgtgactgtgccactgccctccagcctgggcaagaaagcaagaccctatctcaaaaaccaaaaccaaaaccaaaaatggaccaaagagagcatgaaagcaagtaatgatatgcagttgaaagaaataaacttcaacagcatatctaggaacacatgttttaaatatgagggatcttctgagtctccataaatgtctgtgactacagctaataaagcatgttccaccttagtataaaaacatttgggctgggagcaatagctcacgcctgtaatcctagaactttgggaggccgaggcgggcagatcacttcaggtcaggagttcaaaaccagcttggccatcatggtgaaaccccatctccactaaaaatacaaaaacttagctgggcaaggtagtgcatgcctctggtcccagctactcaggacgctgaggcaggagaatcgcttgaacctgggaggaggaggttgcagtgagccgaga

SEQ ID NO: 388 - DNA, 475 bp, Homo sapiens
  misc_feature (324)..(324): n is a, c, g or t.
  misc_feature (340)..(340): n is a, c, g or t.
  misc_feature (370)..(370): n is a, c, g or t.
  misc_feature (450)..(450): n is a, c, g or t.
attccaagccccccccggtcccctatccaaggacaaatgtagggcctctaggatgtcccagacccacctcggagggccagtcagttcaggtaggtcaggcccagttctcttccctcccgacagaccccgggcccggaaagcaccgaagaccatgatgctggctggagtgaagacactcgtttccgtatcaagagctgagcctaagaaatgctcatcgttggtcaggctgggtctgggccaaagggacagacagaaagaaatactgtctccacgggaggaagagggagaggagggaggatggagagcggtgggcatgcagggganttggcagggcagggtngagaaggtgggaccactggggaggggaccnaggtaagagtggctcttcagagcagggtgaagagtctgtggcctaacggaaacagaaaggagcgcccccaacccccattnctttttggttcattcattattggtt

SEQ ID NO: 389 - DNA, 379 bp, Homo sapiens
  misc_feature (128)..(128): n is a, c, g or t.
  misc_feature (158)..(158): n is a, c, g or t.
  misc_feature (161)..(161): n is a, c, g or t.
  misc_feature (184)..(184): n is a, c, g or t.
  misc_feature (202)..(202): n is a, c, g or t.
  misc_feature (329)..(329): n is a, c, g or t.
  misc_feature (374)..(374): n is a, c, g or t.
atcaaaatattttattttaggagacccctcaaaaaaagacccaccacattagacagacgccccaacaacacccttggcctttttttggtctttcctgtatttttccctttttaaatcaactaaaacantttgatgcttaaaataaaagacaggaaatnttncctgatgagactttagtcgagantatagatatatttctganccgggggcgggtgatcaggggcgggggaggagaaggatgtgccaccagtggttcgcgaggttccgtttctcagctcaggagggagcctgggctgcctgggacccgggctagggacccagagctgggnctccacagggcctgaccagggccaggggaaggaagacggaggagngagga

SEQ ID NO: 390 - DNA, 833 bp, Homo sapiens
cggcttccagtccgcggagggcgaggcggcgtggacagcggccccggcacccagcgccccgccgcccgcaagccgcgcgcccgtccgccgcgccccgagcccgccgcttcctatctcagcgccctgccgccgccgccgcggcccagcgagcggccctgatgcaggccatcaagtgtgtggtggtgggagacggagctgtaggtaaaacttgcctactgatcagttacacaaccaatgcatttcctggagaatatatccctactgtctttgacaattattctgccaatgttatggtagatggaaaaccggtgaatctgggcttatgggatacagctggacaagaagattatgacagattacgccccctatcctatccgcaaacagatgtgttcttaatttgcttttcccttgtgagtcctgcatcatttgaaaatgtccgtgcaaagtggtatcctgaggtgcggcaccactgtcccaacactcccatcatcctagtgggaactaaacttgatcttagggatgataaagacacgatcgagaaactgaaggagaagaagctgactcccatcacctatccgcagggtctagccatggctaaggagattggtgctgtaaaatacctggagtgctcggcgctcacacagcgaggcctcaagacagtgtttgacgaagcgatccgagcagtcctctgcccgcctcccgtgaagaagaggaagagaaaatgcctgctgttgtaaatgtctcagcccctcgttcttggtcctgtcccttggaacctttgtacgctttgctcaatcaaaaacaaaaaaaaaaaaaaaaaaaaaaaaaaaaaa

SEQ ID NO: 391 - DNA, 579 bp, Homo sapiens
atgcaggccatcaagtgcgtggtggtcggcgacggcgccgtggggaagacatgcttgctgatcagctacacgaccaacgccttccccggagagtacatccccaccgtttttgacaactactctgccaacgtgatggtggacgggaaaccagtcaacttggggctgtgggacacagcgggtcaggaggactacgatcggctgcggccactctcctacccccaaactgacgtctttctgatctgcttctctctggtgagcccggcctccttcgagaatgttcgtgccaagtggtacccggaggtgcggcaccactgcccccacacgcccatcctcctggtgggcaccaagctggacctccgcgacgacaaggacaccattgagcggctgcgggacaagaagctggcacccatcacctacccacagggcctggccatggcccgggagattggctctgtgaaatacctggagtgctcagccctgacccagcggggcctgaagacagtgtttgacgaggcgatccgcgcggtgctctgcccgcccccagtgaagaagccggggaagaagtgcaccgtcttctag

SEQ ID NO: 392 - DNA, 4152 bp, Homo sapiens
ccacgcgtccgcctgggctcccggggtggcacgagcccgcggccggagtgcgaggcggaggcgaggaggccgcggggacgggaggcgaggccggccgggcccccgaagccatggagaacgcgcacaccaagacggtggaggaggtgctgggccacttcggcgtcaacgagagtacggggctgagcctggaacaggtcaagaagcttaaggagagatggggctccaacgagttaccggctgaagaaggaaaaaccttgctggaacttgtgattgagcagtttgaagacttgctagttaggattttattactggcagcatgtatatcttttgttttggcttggtttgaagaaggtgaagaaacaattacagcctttgtagaaccttttgtaattttactcatattagtagccaatgcaattgtgggtgtatggcaggaaagaaatgctgaaaatgccatcgaagcccttaaggaatatgagcctgaaatgggcaaagtgtatcgacaggacagaaagagtgtgcagcggattaaagctaaagacatagttcctggtgatattgtagaaattgctgttggtgacaaagttcctgctgatataaggttaacttccatcaaatctaccacactaagagttgaccagtcaattctcacaggtgaatctgtctctgtcatcaagcacactgatcccgtccctgacccacgagctgtcaaccaagataaaaagaacatgctgttttctggtacaaacattgctgctgggaaagctatgggagtggtggtagcaactggagttaacaccgaaattggcaagatccgggatgaaatggtggcaacagaacaggagagaacaccccttcagcaaaaactagatgaatttggggaacagctttccaaagtcatctcccttatttgcattgcagtctggatcataaatattgggcacttcaatgacccggttcatggagggtcctggatcagaggtgctatttactactttaaaattgcagtggccctggctgtagcagccattcctgaaggtctgcctgcagtcatcaccacctgcctggctcttggaactcgcagaatggcaaagaaaaatgccattgttcgaagcctcccgtctgtggaaacccttggttgtacttctgttatctgctcagacaagactggtacacttacaacaaaccagatgtcagtctgcaggatgttcattctggacagagtggaaggtgatacttgttcccttaatgagtttaccataactggatcaacttatgcacctattggagaagtgcataaagatgataaaccagtgaattgtcaccagtatgatggtctggtagaattagcaacaatttgtgctctttgtaatgactctgctttggattacaatgaggcaaagggtgtgtatgaaaaagttggagaagctacagagactgctctcacttgcctagtagagaagatgaatgtatttgataccgaattgaagggtctttctaaaatagaacgtgcaaatgcctgcaactcagtcattaaacagctgatgaaaaaggaattcactctagagttttcacgtgacagaaagtcaatgtcggtttactgtacaccaaataaaccaagcaggacatcaatgagcaagatgtttgtgaagggtgctcctgaaggtgtcattgacaggtgcacccacattcgagttggaagtactaaggttcctatgacctctggagtcaaacagaagatcatgtctgtcattcgagagtggggtagtggcagcgacacactgcgatgcctggccctggccactcatgacaacccactgagaagagaagaaatgcaccttgaggactctgccaactttattaaatatgagaccaatctgaccttcgttggctgcgtgggcatgctggatcctccgagaatcgaggtggcctcctccgtgaagctgtgccggcaagcaggcatccgggtcatcatgatcactggggacaacaagggcactgctgtggccatctgtcgccgcatcggcatcttcgggcaggatgaggacgtgacgtcaaaagctttcacaggccgggagtttgatgaactcaacccctccgcccagcgagacgcctgcctgaacgcccgctgttttgctcgagttgaaccctcccacaagtctaaaatcgtagaatttcttcagtcttttgatgagattacagctatgactggcgatggcgtgaacgatgctcctgctctgaagaaagccgagattggcattgctatgggctctggcactgcggtggctaaaaccgcctctgagatggtcctggcggatgacaacttctccaccattgtggctgccgttgaggaggggcgggcaatctacaacaacatgaaacagttcatccgctacctcatctcgtccaacgtcggggaagttgtctgtattttcctgacagcagcccttggatttcccgaggctttgattcctgttcagctgctctgggtcaatctggtgacagatggcctgcctgccactgcactggggttcaaccctcctgatctggacatcatgaataaacctccccggaacccaaaggaaccattgatcagcgggtggctctttttccgttacttggctattggctgttacgtcggcgctgctaccgtgggtgctgctgcatggtggttcattgctgctgacggtggtccaagagtgtccttctaccagctgagtcatttcctacagtgtaaagaggacaacccggactttgaaggcgtggattgtgcaatctttgaatccccatacccgatgacaatggcgctctctgttctagtaactatagaaatgtgtaacgccctcaacagcttgtccgaaaaccagtccttgctgaggatgcccccctgggagaacatctggctcgtgggctccatctgcctgtccatgtcactccacttcctgatcctctatgtcgaacccttgccactcatcttccagatcacaccgctgaacgtgacccagtggctgatggtgctgaaaatctccttgcccgtgattctcatggatgagacgctcaagtttgtggcccgcaactacctggaacctggtaaagagtgtgtgcagcctgccaccaaatcctgctcgttctcggcatgcaccgatgggatttcctggccgtttgtgctgctcataatgcccctggtgatctgggtctatagcacagacactaactttagcgatatgttctggtcttgactgacagttttccataaagaagatgtttaacttaatcaattaatttttttattgtttaaagcaactgtctatttctgctgaattttcacatgaacatactggctggtgatggaggtttcatactctagattttgttttgctttttctgactccagtggggcaagattttccttttttatacacataattaaagtgtccattgacatgtacagagaactaacactattttatgcaaatatttttttgtagatgaaaaagcatgtacagtgttctgtttaatactcatccttgtataaaaaaaatagttgagccagcagacattgtcagcaaattaattggcagcagattttaggaaatgaatgtgtgtggttttttttctaaaactaaatagcatgtattgtgtcttttgcatgatgatccggatttaatttgatatcacagtctaatttttattcataagccaatttttctgcactgagcagagtcttgctacctcagtcagtattgttttggtttgctacttccctcacccactttggcctccgttcaccccaccccaccccacctctccccaccttacccccgccccgcttggcttcttctttaggattgtgatggttcgttctgtttacatcagttttaacgagaggtatgcctgtactcgcttgtgcagaaaacattgttccagattcaatcgactgggtttatgtcccttcacatagtttttaaggttatttatttaaatgtctaatgtattttattgtaacagacattgttttgccaacattgcctatttcagtggcacgtcatctagttttaaaaaaataaaacattttaaatggacagagaaaaaaaaaaaaaaaaaaaaaaaaaaaaaaaaaaaaaaaaaaaaaaaaaaaaaaaaaaaaaaaaa

SEQ ID NO: 393 - DNA, 31737 bp, Homo sapiens
gaattcgttagtgaaagaactgttctatatcttaactgtatcaatgtcagtatcctggctgtgatattgtgctacagttttgcaatatctatttccattgatggaaaatgggtaaatgggtacatgagatttcactattatttcttaacaatttcatgtgactccgtatttatctcaaaataaagaaaaaaattatcttggctgggtgcggtggctcacacctgtaatcccagcactttgggaggccaaggcaggcggatcatttgaggtcaggagttcaagaccaggctggccaacatggtgaaaccctgtctctactaaaaatacaaaaaagtcagccaggcttactggctgtaatcctagctactcaggaggcagaggcaggagaattgtttgaacctgggaagcggaggttgcagttagccgagattgcaccactcactccagcctgggtgacagagctaaaactccatctcaaaaaaaaaaaaaaaaaatacttgaattccagtttctggtctgacatgtaagaagctagaagttgccactctatcctaacaataattaaaaagctgaactaaaaaatcaataactcttttagatgtgtaagagaggtagggtcaagggcaaactactctccctaagactgcagggaccagaacacaaatgctcagaagtagcttgctggaggagaaacccatgagctgaaacctctatgggaacccagtgccaagatagggaacccggaactgtaactgacaaattgctggaggttcagagtggacaagtctgagaataaaaatgtcagacttgggggacccaatcactggggaccctcacacttatgatttttacctctaggagctcaaccaggttctcagtgatatctgagaaaaatccccttgtgcttccatcaaagggagaggaaaataaaccattttgaaatatggcagagcattctgttcttagcaaggtctgcccttgggagaaactatttaaccagagccaaaccttctggggttttatctgagcctaactgacctgggggaagagaaatagccagttccagtcaggtctacccttccacgtggaaggaggaatgggctcctcaactccagcccactttagccatcctgttccactgaagaaggagaaaaatcctgagaaacacttgtgaagttcacagtccagagtacaggctcactcaaagactgagacctacccgtaggactatagaacacttcccctcctcaactccttactacattattaaagacctatttacaggccgggtgcgatggctcatgcctgtaatcccagcattttgggaggctgaggcgggcagatcatggtgtcaggagttcgaaaccagcctggccaacatggtgaaaccccatctctactaaaaatacaaaaattagctgggtgtggtggcgggcacctgtaatcccagctactcaggaggctgaggcaggagaatcgtttgaactcaggaggcggaggttccagtgagccaagatcgcgctattgcactccagcctgggcaacagggcaagactccgtctcaaaaacaaacaaaaaaaagcctatttacagcagttctttttacctggtacatcatgtctgactatccagaaaaagttaacaggcatactaaaagccaaaaaacaaaaaaccaccaaaacccacaatttgaaaaggtagaacaagcatcagaaccacatatgagaggaatactggaataatcagactgggaatttaaaataactatgactgaggccaggtgaggtgactcctgtaatcccagcaatctgggaggccgaggtgggaggattgtttgagcccaggaattcaagcttgggcaacaaagtgagaccccagtctctacaaataataaaaaaaactagccaagcatggtggcatgtgcctgtggtccagctactcgggagaggtgggaggatcacttgagctcgggagattgtagctgcagtgagcagtgatcatgccactgcactccggcctgggtaacaaagcaagaccctgtctcaaaaaataaaataactatgactaatatgctaaaggatctaatggataaagtagacggcagactacggaagcagaaagatggaagttccaggaaccaaaaataaatactactcattaaaaacactgtgacagatatgaagaatatctttgaggcccctattagtagactgttcatggccgaggaaataatctctgaatctgaggatatctcaacagaaacctccaaaactgaaaagcaaagaaaacaaagacgaaaaatacagaacaaaatatccaaggactgtgggacaactacaaaagatgtaacatgcgcataatgagactagaaggaggagagaaaggacacaagaaatatttgaaacaataatgactgagaatttcccccaaattaatgtcagacaccaaaccacagatctaggaagctcaagaagacaccaagcaggataaataacaaaaacacacaagaaactatacctaaacatatcattttgagactacagaaaaacaaaaaatcttgagataagccagagggaaaaaaaacaccatacccatagaaaaacaaagataagaaagctgatttttaggatcatgcaagcaaggagagagtgcagtgaaatatttaaagtgcaggaagaaaaaaaatcactaacctagaactctgtgcaaagttatccttctaaagtgaaggagaaataaagactttaccaaacaaaaattgagggaatttgttgccagtagacctgtcttgcaagaaatgttcaaagaagttccttaggaggaaaatgatataggtcagaaacacggatctacataaagaaaagaagagcactgaagaaggaacaagtgaagataactttagtttttcttactcctaactgatctaacagataacactgtaaaccagaaagtatctgagacaagcatcagtcaatttagaaagtttattttgccgaggttgtggctatgtgcccgtgacacagcctcaggaggttctgatgacatgtgcccaaggtagtcggggcacagcatggttttatacattttaggaatacaggagacatcaatcactatatgtaagatgtacattggtttggtctggaaaggtgggacaacttcaagtggggcgggggtttccaggtcataggtagataagagacaaacggttttattcttctgagtttttgatgagcctttcactgaatacacaatttacaggaatagtctcttatgacttagaatggcttagtgaagcaatagggcaaatgtttaaatgtatgttgcaaagttgtaggatacaagattaatatgcaaaagtcagtgtcttttctatataccagcaatgaacaagtggaatttaaaattaaaaacacattaccatttatattagaacccccaaaatgaaatacttaggtataaatcaaatgaaatatgtgcaagatctacataaggaaaactatgaaactgatgagagaagtctaaaaacaacaaaataaatatagagatttcatgttcatggagaagaagactcaatactataaagatgccagttcttcccaactgaactacacattcaacgcaatgccaatcaaaatcccaggaaattattttgtggatattgaaaaattgactctatagtttaaatggggccaggtgcagcagctcatgcctgtaatcccagcactttgggaggccgaggtgggtggatcacgaggtcaggagtttgagaccagcctggccaacatggtgaaaccccatctctactaaaatacaaaaattagctgggcatggtggcgggtgcctgtaatcccagctactggggaggctgaggcaagagaattgcttgaacccaggaagcagaggttgcagtgagccaagatggcgccactgcactccagcatgggcaacagaacaagactccacctcaaaaaaaaaaagtttaaatggaagagcaaaagactcagaacaggctgggtgtgacggctcatgcctgtaattccagcactttgggaggctgaggcaggaggatcacttgaggccaggagcttgagaccagcctgggcaacatagcaagatcccatctctacaaaaaaatataaaaaatcagctgggcacaatggtgtgcacctgtagttctgtagttctagctactcaggaagctgaagtgggaggattgcttgagcccagaaggttgaggatgcagtgagccatgatcgtgccactgcaccccagctggggcagcagagcaagaccttgtctcaacaacaaacaagactcagaatagccaactcagtattgaaatggaagaacaaagtcagaggagtaacactacccaacttcaagacatcctttaaagctacagtaatcatgacagtgcagtattggtgaaagacaaatagagtggaatagaatagaaagcccagaaatagacccgcataaatatagttaactgctctttgacaaaggagcaaaagcaatataatggagaaaagacagtctcttcacaaatggtactgaagcacttggatatctacatgcaaaaaagaaaaaatgaatctagacacaaaccttacacccttcacagaagttaagtcaaaatgtgtcacatgcagaactataaaactcctggaagataacataggagaaaatctagatgatcttggctttggcagtgactttatagttgttaacaccaaaggcatgatccatgaaaaaaacaattgacaaggtggacataattaaagaatttaaataactaaaactaaaagtctctgctttgtgaaagacactgtcaagagaatgaaaacataagccacagactagagaaaatatttgcagaagacagataaaggactgttttccaaaacatacaaagaactcttaaaattcaacaataggagccgggcgccatggctcacgcctgtaatcccagcactttgggaggccaaggtgagcggatcacctgaggtcgggagttcaagaccagcctgactaacatggagaaacctcatctctattaaaaatatataaatacaaaaattagccaggcatggtggtgcatgcctgtaatcccagctactcggggggctgaggcaggagaatcacttgaacccgggaggcagaggttgcggtgagccgagatcgtgccattgcactctagcctgggcaacaagagcaaacctccgtctcaaaaaaattcaacaataggaacacaaaccaatttaaaaatgggccagagaccttaacagacacttcaccaaagacaatatacaaatggtcaataagcatatgaaaagatgctacacatcaggccaggcatggtggttcatgcctgtaatcccagtattttgggaggccaaggtgggcatcacctgaggtcaggagtttgagaccagcctgctaacatggtgaaaccccatttctactaaaaacacaaaaaattagccgggtgtggtggtgcatgcctgtaatcccagctacttgggaggctgaggcaggagaatcgcttgaacccaggaggcagagatcgcagtgagccgagatcacaccattgcactccagcttgggcaacagaagtgaaactccgtctcagaaaaaaaaaagaatacaaggaaaatttgacaggaaaactatatagtttacaacattaattaaatattacaatcttaaaggagaggagaaacaaaaatctcattaaatgcttaaaagggaaactgataaaatttgaaatagattttcttaaaacttgagaagaataaaattgggatgagtaaattagggttgacaaactactagaaggaaaccttttgtttttattatggaaattttaaaacaaaatagaatgaaacatagaatagtattaagtaaaaaagaatataacaaaaaatagtataacgaaactccatatgcctatcactcagatttaacaattatcaatttatagctaatcttttctcatacaaaaccccacccctactcctttacccccatctattggattattttgaaggcaatcccagacactatattgcttgatagacttatcactaaaaatacaaaaattagccaggcgtggtggtgtgtgcctgtagtcccagctactcgggaggctgaggtgggaagatcacgtgagcccaggaggtggaggttgcagtgagccaacattacacaccactgcattccagcctgggcagcagagtaagaccctctatcaaaaaaataaaaataaaaacaaaaaagttaatggaaataacaggcccaccaagtgctcaacatttaattaaaatagacctacatcatggcacatcataaaatttcaagatactgaggtcaaaagatctcataagcttccagaaaggaaagaaacaggtttcagacaaaggattaagaattagaatggcactgtaactctcagtagcaactctagaagctgaaagacaatgaagcaatgcctcaaaattctcccatccaagtactaaccaggcccgaccctgcttagcttctgagatcagatgatatcaggcacgttcagggtggtatggctgtagatgcaatccctcaaaattttaagggaaaattatttccaacctgcaattctatacctggctatgttctcaataaaatagaacgctagaataaaaacatctcaaagagtctctgaaaattatttcaatgcaccctttctcaggaaggtactacaggacatgttccccccaaattaagaagtaattcatgagagagaaacaagagatgtttccatgacaggaaacaagagatccaatacaacagaaaagtgaggggaatccctgggataatgaagaagaaaaatctccaaaccaaacgtgaatcacaggcatagagaataaactgtccattgatgattgattggaatacgaaagatgaggaagaagaatctaggattacatctagggttctgacttgaacaacttggtgaagcagcatataattaggtaagaaacatcagaagagcaggtttaagagcaggtatgtttttggacatggtgagtttgagtggagatggtgaatacacagttacctaggcacagcattgacatttaggctagagatacagagttatatgctgtcagtgaaaagatgggaacctaagtccccaaagtggaaaagatcaccgggaacaaagtatagaatgaaaagaagtatagcatgaaaagaaaagggcctaggatagagccctgaaaacacccagatttaagggtgaggcagaggagaagctagccaaggaggggccggggagtcaggaagaaaatgaggagaacgggagggatcatgacagcctagagaagagactgcttcaagaaggatggcatgttcaataattaaggaagaaaaagagtttaaagcatccagtggatctagtgacatggaagtcactagtaataagagcaataatctttgcatattagattatcaaagatcaaaaatatttatttgatagttatcagatattaaagaagtggcaccctcatatgctgttggtagaaatgtaaacaagtaccacattttttataagcaatttgggaacacctatcaaatataaaatatgcataaactttgacccagagcttctttcacatatgccaccgaaatactggtacaagtgcacaaagtacaagaatgttcaaagcaggccaggcgcactggctcacacctgtaatcccagcactttggtaggccaaggcgggcggatcacttgaggtcaagagttggagaccagcctggccaacatggcgaaaccctgtatctactaaaaatacaaaaattagccaggcatggtggcacatgcctgtaatcccagctactcgggaggctgaggcacttgaatcacttaaagccgggaggcagaggttgcagtgagccgagatcgtgccactgcactccagcctgggtgacagagcaagactgtctcacaaaataaaataaaataaaataaagaatgtcaaagcagcccgtaatgcaaaattggggatgagaggaggaactacatctctatcaagtggaaaaggagtgaataaatttaatggaataaatgtgtccggtggacacctaggtagctgctcataaatgaagtagctatgattgtactaacatagaatggtagctgtgatacagtaagtaaaaaagcagaatatatagttcccatgtgtctaacactgtatatataggaatagatatgcatatacattataacaatataaatgtttgtaaatgcatagataaaaatataaaaactgttagaggtgaaatctatgaaatgggatttggaaggcaaaggatggcatttacttttccactagttgaaattctttacaaaaaggtataatttttatcaatgtttaaagagaacatgaaaggataaaagaaaaaaagcattaactaagagaagagtctgggagaaatgagaatggccagctgtccaatgcccttacctttcctgagacaaattcttgccataggctttgctgacaaaatctgttaattgcaactttgggcaagatgctgtgtctttcccacagtcttcaaagtgcacggagagaaagagttcactcagaagctgcagcacttgggagtgggccatgtttcttgctgtgcatatgtttagggccgcatagaacactccctccaaccacttgatattgaggattattccccctacacatcaatgagaaggtaaataccagttagcaccaccaaaaatgagttgcagaaaacctagaataaacccctgacagtgaatagccgccttttttccaagacagattggtaatatgaaccacaagataagcaaacattccttcctgagccacaagtgctacttgtgccctttataacacatcatgtgttgaccatcccaaaagtggacagatacaactaatgtagacattgctaatggcaaaaagtgtctctggaatagtcgttgctaatatggagaaggaactggggaaaactacaagattagaacagggaaaagccattttagtccaacattacatcctcctattgaaataagctatctcctcttttggttttaatttgtccttaagaagtccaaatgatcaagcttctcagctcttcctaagtagctctcctgcagtaccttgtgccttacacacacacacacacacacacacacacacacacacacacacacagagagagagagattgatttaataagatagcaatgggccaacaggaaagtaattttcaaaagaatgccagaaatatgttgagccgtgaccagcaggactgtagggacaggtagcttgaagaatcgtaggatcttggagagcagctatgactcccttattggccccccagacgctgacagaatcttcatcatactgatactgaggccgcaagatattggtgtggttcaacagtagtttcagcctggaagtaaagccaagacagggagtgcaatgccaggactggaataaatgacgacataacccactgtgtttacatccaaccccatcaacagactcccccacacagctcagagataaatgcgggtctgggtctgtgctgagagcactaattaactggactgttcatccacctaacaaatccttacttattgaatgttatgtgctaggcactgggctagaaactaagtgtgcagaaataatatttgacacatactttcagtaacttttcatgttattgaccgatggtttctcttctcattgatgcacaaggagaatacttcagtgttcaagtaatgggaataaatgttctattgcaattttaaacctttgtacagcaacaaaaatggtttgtggttactatttgtgggtaagtagggaagttacgagaaagattggctaactatgttcttctacagataaagctgcttcctccttattactggaaacaaccaactctaagagataggggctacagtggaggtgggaggcagaagtcagagataaggagacagagcagttgtgccagttccattctcaccctaacaagatacctgggtagtgggatggcagctacaaagctgtacacaatgctggccttctcaaggctggtgtaaatttctacgcagatattaggcagctgagacggcaagcagcagaggaatatcacatcggcccaactcaccagatcagcgttatggtaaaagcatttgattcccagcttctggagctcacctgggagggataaaggaagacaggaagagcacagtactaaagagtttgacctgaacatcaactatggggagagggtgatcattattttagctcagtaaatcaacccatcttattgctccataaatcagaagatattccttcctacagaccttctaaaagccacgcagcaatgccctaactctattactaaagcagcagtagtacttgaaattataattcatcttttttttttttttttttgagacggagtctcactctgacgcccaggctgcagtacactagcgtaatctcggctcactgcaacctccgcctcccgggttcaagcgattctcctgcctcagctgctcaagtagctgagattacaggcatgcgccaccatgcccagttagtctttgtatttttagtagagacggggtttcactatgttggccaggctggtctcaaattcccaacctcagatgatccgcccatctcgtccgcccaaagtgcagggattacaggcgtgagccaccacgcctggcctataattcacctttatcttacttttagatcaagtgctggaatttttccaatttttttttaagacagggtcttgctttgtcacctgtggtgtgatcatggcttactatagcctcaacttcctgagctcaagggatcctcccgcctcagcctcccaagtagctgggaccactggtgagtgtgaccatgcccagctaatttttttattttgtgtagagacaaggtctcactatgttgcctaggttggcctcaaaccccaggactcaagtgatcctcccacctccgcctcccaaagtcctgggattacaggcatgagccctatgtgctgcccagactttttttttaggaagaaaaaaaatctcagagaagtcttttactccaatgtactgcaggataaccatgtgtcagataatgtacaaaggactttacagtttctaaggtgtaacccccacaaggaccttatgaagcagaaacgagtagcagtcccattttacagatgagactgaggattcaagaagttatatgacttgtccaaagttacagagctgctggcttgaggtggtggaaaagactaggagagtggaaggtataaatcagaggctgagaagggtttgcaaagatttaacagtttctgtaaagtatatacaaattaattttattaggatatctataaatgaagaaagactgataactcatgtagttgcataaaaacactcactggtagttaattttttttttttttttttttggctagcgatgggatctcactgttatccaggctggtttccaactcctggcttcaagtgatccccctgccatagcctcccaaatgtgctgggattatgggcatgaggcaatatggattttcaaaagtataaacctaaagtgttcactcacatctggtggtatgtcataaatgtcattggaaaacagaatataacagacattggagagtgacttcttatgttaaccactgagagtacatggcaaatgtaatgctaaggttatctagatactgataaacctggaagaaagacagatgatttggtttggctctgtgcccccacccaaatatcatctcgaattgtactccccacgtgttgagggagggacctggtgtgaggtgattggatcatgggggcagtttcccccatgctgttctcatgatagcgagggagttctcatgagagctgatggtttaaacatggcactttcccctgtgtgctctctcctgccaccttgtgaagaaggtgcctgcttctgcttcaccttccaccatgactgtaagtttcctgaggccttcacagccatgcagaactgtgagtcaattaaacctcttttgtttataaattacccagtctcagacagtatctttatagcagtgtgaaaacagactaatacaacaggacaaagtttagaaaacaggcctatctatcattctctcctgtgttgttctcattcttttcatgtgcatagaagctgatgttgagcattttgaattattgtttccttacacaacacatagtgatattttacaactataattttattctaataaatatattgctttgcaaagaatatatatactttgttgaaatatcacatatattagtcctattgatgggataaagatatataccttgagattttttttttttttttgagacagagtcttgctctgtcatccaggctggagtgcgtggtacaattttggctcactgcaacttctgcctcctgggttcgagcaattctcattcctcccctgtagctgggattcgaaggtatgtgccatcatgcctggctaagttttgtatttttagcagagatggggtttcatcatgttggccaggctggtctcaaactcctggcctcaagtgatgcagctgactcagtctctcagagtgctgggattaccggcatgagccaccatgcccagttggtaagattttttttttagtttccttaggaatataggaaaaaaaaaatggccaggtgtggtgacttactcctgcaatacctgcactttcagagggtgaagtgggaggactggttgagcctagcagtttaagactagcctcggcattagagtgacaccctgtctctatttataaaccaaaagaaaaaaagaaaaaaacattacaaatcaataagaaaaataaacctgggcactgtggctcacacctatatcccagcactttgggaggctaaggcaaatggatcacttgaggccaggagttcgagaccagcctggccaacatggcaaaaccctgtctctactaaaatattatacaaaaattagctgggcatggtggtgtgtgcctgtaatcccaggtatgtgaggggctgaggcatgagaatcacttgagcttgggaggcagggaggttgtagtgagccgagatcatgccactacactccagcctgggtgacaaagtgagactccatctcaaaataaataaatacatatatacataaataaatacataaataaagtaagtaagaaaaatacaggcacaccaacagaaaaaatggtcagaagcacctcagaaaaaatgacatagtaataaacctaagaaaataaaactcttctattgattaatgaaagacatattaaaacaagaaaataatttaaagtatattaaaatggtgatgttaaaaatgatcccagcactgacctgtgtgtagtgaaatgggtgttcttatgcaatgttggtaaaaaagtatacctgaaaaccttttgggaggtcaatttgaaaaaatacattagaagtttctttaaattttaaagatatacctaccacatgacccagccatttcactgccacatatttacccaagaaaaatgaaagtagttgcctacatgaacacttatatacatgtattcatggcagctttatttgtaatagccagaaactgcaaacagcctaagtcaaccaaataaataaactgtggaataatcatgcagggaaatactactcagaaataaaaaaggatattgatacattaaaaacgtggatatatttcagctgggcatggtggctcacgcttgtaatcccagcactttgggaggctgaggtgggaggatcacttgaggtcaggagttggagaccagcctggccaacatgatgaaacaccatctctattaaaaatacaaaaaattagctgggcatggtggtgagcgcatgtaatcccaactacttgggaggctggggcaggagaatcgcttgaacccgggaggctgaggttgccgtgagccgagatcacaccactgtactccagcctgggtgacagagtgagactctgtctcaaaaaaaaaaaaaaaaaaaaaacttggatatatttcaaacaaattatgcagtgtgaaagaagttagactaaaaaaacactacaaactgtatgattccatttagataaaattctagaaaatgcacactaatctatggtgacagaaatcagattgttggtttcatgggtggagagcttcagggaagtggacagaaagggattaccaaagacaagtggcaacttttgggggtgatgggatacgttcattaccttgtgatggtttcacagttgtatacgtgtcaaaacatcaaattgtactcttttaactgtgtgccatttattgtatagaaataatattttaggggcaggtgcagtggctcacgcctgtaatcccggcactttgggaggccgaggcaggcagatcacctgaggtcaggagtacaagaccagcctggctaacatggtgaaaccccgtctctactaaaaatgcaaaaaaatttagctgggtgtggtggcgtatgcctgtaattccagctactcaggaggctgaggcgggagaatcgcttgaacccgggaggcagaggttgcagtgagccgagatcgtgctctccacgatctgcactccagcctaggtgacagagcaagactcagtctaaaaaaaaaaaaaaaaaaaaaaaaaatttaataaagctgtaccaattctttggcctaataactttatttggaaaattatgtacaaggaagttcaactaaataaggcatagttacataaattatggtacatccatactttgggatattatacaaccttaaaatctatttttttacattaatctcttactaatataattaaaattttaaatcctgagatgaaaacagagaaaggaagaatagtgtagggtgtctagtggtcttagccactgctgggcacaactacatagtctgtgcatccaaacaccaggtacagcaagcacaccctgctagggagatgcaagagactgtgctcaaagcctgctggggtaaccttctactgtgggaaagtggaggggcttaacatcattatttcttattgattgattaattgagacagagtcttactccgttgctgaggctggagtgcaatgatgtgatctcacctcactgcaagctccgcctcctgggttcaagtgatttgcctgcctcagccgcctgagtagctgggactacaggaacccaccactacacctggctaatttttgtatttttagtagagactgggtttcaccatgttggccaggctggtctcaaactcctgacctcaggtgatctgcccacctcggcctcccaaagtactgggattacaggtgtgggcaaatcattatttcaaaaaatgttaaacgatacgagaatatgctcatgatacattatgtaaaaaaaaacagaatacaaacaactgtatacagtgtcgattactgatataattagagaaaaaaaaaacacgggaaggaaataacccgagtagattataggtagttgtatccttccttgtagacaaattttctacaatatgcatattattttacattttttattattgaagtataatttacatataatgcaaaacacagatatgaagtgtacagtttgatcagttttgacaaaagcatacacccatttaacccatacctctctctcaagatataaaacattttcatctccccagaaaaagttgctttgggactttctcagtctatctccccagaagaaatcattgttctgatttctatcaccataaatggaatcattacaaaacttttttttttttttttttgagacggagtcttactctatctccaggctggagtgcagtggtgtgatctcagctcactgcaacctctgcctcctgggttcaagcaattctcctgcgtcagcctcctgagtagctgggactacaggcacgcaccatcatgcccagctaatttttgtatttttaatagagacagggtttcactatgttggccaggatggtctcaatctcttgacctcgtcatctgcccgccttggcctcccaaagtgctgtgattacaggcgtgagccaccgcgcccgaccacaaaacatttttttaaagtcagtaaatgtcatttttaaaaatataaggccaactgcaaatgcctggaactgtttaacacccaaccagaccctaactgattcagttagaagatctgaactctgtatggaaagcttccctgtatcaaagatctggaaagatacttcaccaccaagggcacagggaggagacatggatataaaacacatacatggagaaaaaaagtcgctttaaagaacaggagaaaaggccatgcttctaacctttcttagggctagcaagctgagaactccacacgctgtatgcaaggattcctctttggaggaccctttcaaaatggctttgttgacacctacacagcacaaccaagccccctttctaccacacactgctcctcacccagagtctctggcctccgagtggagatccgcaggctttcagcagggatggggccaagctgcagcagtgtgccagccagctgcttcccaaggtggccacctccaatgatgcccaccttaaactcttcaggagtggctgaattaagggagccaattgagagatgtctggaactttgattcttatttaatgatgctctggagaatgaacacacagacacgtacataaatacatgcacacactagtttttcttttttttttttttttttgagacagagtcttgctttgtcgcccaggttagagtgcaatggggtgatcttgactcaccgcaagctccgcctcccaggttcacgccattctcctgcctgtctcccgagtagctgggactacaggtgcctgccaccactcccggctaattttttgtatttttagtagaaacagggtttcactgtattagccaggatggtctccatctcctgacctcgtgatccacccgtgttggcctcccaaagtgctgggattacaggcgagagccaccgcacccggcctagttcttcttaactgtcattctctgacattttctgctttgtcatttaaggtgcttggtggcaccttaagtacttcggagataagacatttcaactgtgtgtcatttatccagcctcactagggaatgaaatgttcctcctgagttaattttccagaaacaaaagtataacccttttcaagggaccaaaatttaaaatgttttaaatgaacatactttgttacatgtattatgcttgcctggttaaacagtctgaatatttaatcatttcactggctcaggacaccactgtgaacagccactattatacagcatactgtaatgtctataacacattgtgggccagtcccctcatgttttgtttgtttctgtgcagacagctttcaatttttttttttattgtggttaaaaaacacatgctgggtacggtggctcacatctataatcccagcactttgagaggccaaggcaggcagatcacttgagctcaggagtttgagaccagcctgggcaacatgtaagacctcgtctctacaaaaaatacaagaattagccaggtatggtggtgcacacctgtagtcccagctacccaggaggctgaggtgggaggattgcttgagcccaggagtttgaggctgcagtgagctgtgctcgtgccactgtactccagcctgagtgacagagcaagaccctgtctcaggaaaacacacacacacacacacacacacacacacacacacaccatgaacttcaccatcataaccatttttaaagtgcacagtacagttgtgttaattatatgcacattgtggctaggcatggtagctgatgcctgtaatcccagcactttgggaggccaaggcgtgtggatcacttgaggtcaaaagtttaagaccagcctggccaacatggtgaaaccccatctctattaaaaatataaaaattagcccagcatgatggtgtaaacctgtagtctctgctactcagaaggctgaggcaggagaatctcttgaacccgggaggtggaggttgcagtgagccaagatccactactgcactccagcctgggcaatagagcaagacttgatctcaaaaaaagaaaatacatatagatagatagatagatagatagatagatagatagatagatagatagacagacagacagacatatagatatagttgtgcaacagctctttagaacctttccatcttgcaaaactggaactctatatgcttttttttttttttcgagacagtctccctccattgcctgagctggagtgctgcggcacaatctcagctcactgcaacctccacctctcacattcaagcaattctctgcctcagcctactgactagctgggattacaggcgcgtgtcaccacaccccacgcccagctaatttttgtatttttagtagagatgaggttctccatgttggccaggctggtctcgaactccccacttcaagtgatccgcccacctccgcctcccaaagtgctgggattataggcatgagccaccacacccgacctgaaactctatacaatttttctctctccccagcccctggaaactaccattctactttctgttccactactttagatacctcatataagtagaattatgcagtattgtctttttgtacatggctaatttcacttagcataatgtcctcaagcttcatccatatcaatttttggattttttttctatcttcatgaaaaatgtcattgggattttgataaggattgcagtgcatctgtagacagcaatctacagggtcataggacaatagcgtgggaaggtcagcagataaacaagtgaacaaaggtctctggttttcctaggcagaggaccttgcggccttccacagtgtttgtgtccctgggtacttgagattagggagtggtgatgactcttaaggagcatgctgccttcaagcatctgtttaacaaagcacatcttgcaccgcccttaatccattcaaccctgagtggatacagcacatgtttcagagagcacagggttgggggtaaggtcaccgatcaacaggatcccaaggcagaagaatttttcttagtacagaacaaaatgaaaagtctcccatgtctacctctttctacacagacacggcaaccatccgatttctcaatcttttccccacccttcccccctttctattccacaaaaccgccattgtcatcatggcccgttctcaatgagctgttgggtacacctcccagacggggtggtggctgggcagaggggctcctcacttcccagtaggggcggccgggcagaggcgcccctcacctcccggacagggcggctggccgggcggggggctgacccccccacctccctcccggacggggcggctggccgggcagaggggctcctcacctcccagtaggggcggccctttcttatttttaacgtaggcatttacccctataaagtttgctcatagtactgcttttgttgcaacccataagttttggtatgttgttttcattttcacttaagatattttcaaattttccttgtgatttcctgtttgattcattggttgttcaagagttgtgttgacttccacatatttgtgaactttctagtttttcttctgctatttctagtatcattctattatggtcaaaaaaaaaaaaaaaagacggttggtatgatttgaatcttcttaaatttgttaggacttattttgtgacctaacgtgatctatcctggaaaatgttccatgtgcacttgaaaagaacgtgtattctgctgctgagtggagtgttatgtacttgtccattaggttctaattggtgtgtcatgttgttcaagtcttctgtttccttactaaccttttgtctggttgttctatccattattgaaagttgggtattaaaatctcctactataattgtataccttcagttatgtcaatatttgcctcatatatgtggatgttctgatgttaagtacatatataattgttgtgtcttcctggtgaattggtctttttatcatcatgtcattctttgtctctcatgacagtttttgacttaaaacctattttgtctgatacaagtatgactactcctgttcttttttggttaccatttacgtggaattatctttctctatggtctgactttcagcctatatgtgtcctaacatctaaagtgagtctcttgaagacaagatatacgttggatcttgtttttgtttttgttttttatccattcagccactcggtatcttttgattgatgggtttaatccacttacatttaaaataattactgatagggaaggacttatcactgccagtttgtttttttctctgtgttgcagttttgttcttcttttcctctcttgctgccttcttttgtatttcactgattttttttttttgtaatgacattattttctttttgttgttggtattttctttgtagttaccgtaggaaattgcataaaaatcataaaaatagttgtaacaacctattttaagatgataatgtcaatcatatacaaaaactctacttcatcttcccctacccctgctttttgttatttatctcatgaattatatcttttggatattttgtatccattagcatggttttatagtaataggtttttttttagtatttttatttttgagacagggtctcaccctgtggcccaggctagagtacagtggcgtgaacacagctcacttcagccttgatctcctgggctcaggtgatcctcccgcctcagcctcccaggtagctgggactacaggcacacaccatcatacttggctaatttttgttatttctagtagagacagggttttaccacattgcctaggttggtctcgaacttctggaatcaagcgatccgcctgccttagcctcccaaagtgctggattacaggcgtaagccaccgtgccaagcctatttttaatttttattatttatatttatacttattgatatttataattttattttatacattttattatttctatatttacatttttatatacattttatttatctatttatgagacagggtctcgctctgtcacccaggttagagtgcagtgacatgatcattgctcactgcagcctctactttccaggctcaagcaatcctcccacatcagactaccacgtacctgagaccacaggtgtgtaccactatgcccagctaattgtttttttttttaagagatgttgtctccctatgttgcccaggctagtctcaaacacctaagcccaagcaattctcctgccttggcctcccaaagtgctgagattacaggtgtgagccatcacacttggccagcttttatctttaaatcctataccacaattaaaaatgatttatgtgccacccatcacagtattatgtatatggctatatattcacctttgccagagagctttttatttttgtatacttttgtgttgttgactagcatgttttcatttcaacttaaggattcccttcagcattagttgtaaggcaggtccaggagtgatgaggttttttgttgttgtttatctgggaagctctttctttctctttttttttttttttcttgagatagagttttgctattgtcacccaggctgaagtgcagtggtgcaatctcagatcactgcaacctctgcctccctgggttcaagcaattctcctgcctcagcctcccaagtatctgggattacaggtacctgccaccatgcccagctaatttttgtatttttagtagagacagggtttcaccacgttggccaggctggtcttgaactcctgacctcaggagatctgcccgcctcggcctcccaaagtgctggggtcacagatgtgagccaccatgcccagcttctccttagtttttgaagcacaggtttgcaagagatagtattcttggttgacaggtttttttttttctttttccttttttttttttttttttttgagacagagtctcgctctttcgcccaggctggactgcagtggtgcaatcgtggctcactgctacctccgcctcccgggttcacgccattctcctgcctcagcctcccaagtagctgggactataggcgcccgccaccacgcccggctaattttttgtatttttagtagagacggtttttcaccatgttagccaggatggtctcgatgtcctgacatcgtgatccgcccccctcagcctcccaaagtgctgggattacaggcgtgagccaccacacctgaccaacaggttttttttttctttcccctttcagcactttgaatatatcaagcactcccttctggcctgtaatgtttctgctgagaagccaccaatagtcttctgggaactcccttgcatgtgataagttgctttttctttgcagctttcagtattctttgtctttgacttttgatggtttgattataacgtgtctctgtgtggtcctctttgggttcatccaaattggagtcctctgagcttcttgaatttggatgtccatttccttcctcagatctgggatgtttttggccattatttcttcaaataagctctttgcaccttgctctgcctctcttctccttctgacattcccataaggcatatattgacccacttgatagtatcctgtaagtcctctagattttcttcacttttcttttctttttgctcttctgatttcataatttcaaataactggtcttcaaatttgctgattctttcttctgtgtgatcaagtctaatgttgaaccactctagtgagttgtttcaattcaattattgtgctctccagctccaaattttggttcttagtttctctttatgatattattttattcatgtattgttttcctgatttcatcagtttttttttgttttgttttgttttttcagagacagggtctcactatgttgcccaggctggtctcaaactcctgggctcaaataatcctcccacctcagcatcccaaactgctgggattacaggcctgtaatttgtaatttgtaatttgtaattacaaattacaggcctgtaatctgtaatctgtaaactttgcccagcctagttgtttttctgtgttttgtagctcattgagcctctttaagattattactttgaattctttgttaggtaactcacagatctgtttctttagggctggtttctgcagtagtttgttcttatggttgagcaatattgcctttttaatttttggtggaatttgggcatttgaaaaaacagtcaggcctctcccaatctttacagactggcaccatacaggggaagatctttcccaatcagcccagctagagattctggggcctgtcaaatctttccaggaatgtgtcttctctgggcttgagtttggaatttcccaattaaagagttttgcctgtttctattgcaggggctgataatcttttcctcactttggtatctatctgcagtactgcaggttctctgtactgcaacaagccactgagtgatcctttgttttcatccaaaatatgttggttcctcatcagtgctccaagtcatgtgagacagaaaccaatccctcaggcagcccccaaaaaggcagaacagtggacaaacattccatttttctttttccctccaaaggagaagccacaaattaggcattttctcctgatcacctgaggctggcttgaggaaagggatatcttaggtgaactgcaatggcttttcttacccctgtaaatgcagctgttcttggatttgtacctctccagggcactacaatttcttaagtgcttgctggaggtttcataaaggctttttggaccatatattgttgttaagttagtgtctcgaggttacagagtctggagcttcctatttcttcatcttactgataccaatctgagacagatgtcaatttttattgctattagatgtgagtgcattcctttcctacgatacacccactctttctagtttgctatttcaaatctgcagacttgagaaaccagataacttggctttttaagaaggttatgacttatacacataaatggtttataaaaacaaaacagtgttcattcagggtacaactttaaactacaaaaacaaaacaaaaaagaacagaactgagaaactaaggatgaagatttcagaccactatttccagaggttcacttactgttggtgctggatgtgtttccttggcgcaagattaacaaagtcagacttctgaatacataaggtatactttcgttgctatatgacagccttatatttgttctgtatttctgtaaaaaccagtgtcttaaagctctggattttgcttctaagcaacataagtcactctctatttaagccttctctcctggttgaaagagcattttctcttagtgcctgatccttccaaatataaaatgccacctgcaagtttcatatattgttttctcccagtcatattgagtaccaccaataggtttatgcatccttatcagtaagccagtcagtaaattcactgagaagcctgcctccttggacatgtgctgtatctataaacatgttcaattcaaatttggtcccaccatctaggaattaatctaacttcagagaaaaactaagaagtagagtgaggaggtgacatatgctcccagagtgacctggagttgcagaattcagaagcctaattataggtacctgcttcacacacatttcctatttaagtgtctgaagccatattgtagaaagatatcagaatcaagactggactgacagcttttctgcaaatcaatattcctggtttcaaggaagtcactggcacagggcctgtgaagtcccgggtagcttcctgtaagggagcattccactattacctcagccccaaaagaaagaactgattccatttgcattccttgccaatagataaggaatggctagacattagcaactgtggagggcaagctggtggtcatgatgactgagtgaatggatgaataaatgatcatttaatcaatccatccactaaaaggtaatcactactaatccatgctttattatgtaaccacagccaggggaccctggtatagattttcctgtccttttagaccaggagtcattgactctgggttggaaaagataggatgacaatccaccagccaaacttaccctccaatataaaaaaaatttaagacatttgaattctcagcagtgagattcttgtccatcttcctgaatttggatactcggcttacctcaaattatataatagtttgcagaagaaggttgcatgggcacaagcctcgatcatcagtccccgagaacggccctgcaaatacagccagatacgatcttcctctggaaccccatactcaaactgcagggactcaaggtcctggagcatgtccatttccaagccactatttcctgcagtgatagacactaatcaatttggctccctgtcccggtagaagaggggtctatgtaggaggtgtgtgtatgatggtgtgtgtgcccaggtcacaagcactcatgatgatgggcttcagcacctctctactcccagattctgaatttggaattcacctctcttgaattcacactctagagtgtgagtgtttgaggattcctaatcactggctgcccatgaatcctggactcatgaaaaacctgtacagaaacccaaagtattgtttctccacacaggttacaggcactgttttcggcagatgaatttacaacagcaattgagttttacaggtattcttgggccaggacgttttcccttccattccctcctgcgttttggaaataggactgaacacatagaaccacatttcaaagaaatgcttccctttcactaaactctgttctccacagggtacaaaataacccaaactaaatatcattgtcccctgtctagggcagggacatctagattttacaaactaaactcaaagtcatataaacccatctacatatatctatcaccaaacagagaagattggctctgctcctcagtacttctgatcctggaaggtaagaactacatttctaaggagaattaccaagaaacttgtgattatgactccttaactaccagattacagtctctaagtcttaaagaggccagccccacttagaggttttcctgagctgcgtatcaggacatgagttccttccactatttctaggagtactacactagagcagtatgagaccctccttttcccaacagaagattctggatttctaggggttttttttgcagactagaatatcttacagatcttagcactacttgagttagtttacaactccttctttttgtgttcaagaaaccaataaaattttttcaggtgaaatccacataacataaaattagccattttaaagtgaacaattcatcagtacattcagaatgttgtgccaccacctctatcttgttgcaaaatactttcatattcccaaaaggaacgcctacacccattaagcagttactccctatccctccccaccctcagcctctggaaccaccaatctgctttctgtctgaatggatttacctattccagatattttatataaatggaatcatacaatatgtgaccttttgtgtctggcttctctaatcccttttataggaaggctgttatatgacgacaccatctctttaaaagcaaagtctcaccctggcgtggtggctcacgcctgtaatcgcagcactttgggaggccgaggcaggcggatcgcttgaggtcaggagtttgaccagcctgactaacacggtgaaaccccatctctactaaaaagctgggcatggtggcagctacttattagctgggtgtggtggcacgtctgtaatctcagctactcaggaggctgaggcaggagaattgcttgaacctgggagatggacgttggttgcagtgagctgagattgcgccattgtactccagcctgggcggcagagggagactccatctcaaaaaaataaaaaataaaataaagtaaaagcaaagtctctgcacttgaaatgaggggcatggacgttctcatcaaacctaagaaacattttcttacaccaaaacagtcagtaggtcatcctaatgttgccaagtaatgcttcctgctccgaaggaaaaagaagctcaaaacctagattagcatgaccaatgcagcatacaagttgtacagacatgaattctaggcctatcctttacttatgcattctcaaaagtggggatcagttgttatattttgtattatgtcaccttggctaggctgaactgcaatttccagaatgtccttccctgtatgtttccagttaaggtggaccaccagagatatttctatgcaagatcaggagggtggaaatgaacagtaaccagtctgtgtttcagtgtgcataatcaggggaagtacttttgtagttcacacatgttgttgtttatctgctgagtaccttgttggtgaggggcaacagttgggcctgtaactgctacatcttccctggttccttcttcagttgctcactcctgggccaggtgtttttcatttccatgacaaaggccactagcttttccagcagcgggacacccacctcatcaaggtttgaggctgtgagaactgacatgggtcccagtcccttctcatggtttctagcttgtccctgctcactcactttataatgatcttcccttcttcacggccttccctatggatttcaagctctaccactggacatgaagacaactacgttaaacacaccctccagctgccatacttgagtggaagtactcaaacagaaaagacaggctctactcctcggtacttctcatccaatttctctaaacaggtcagagaaaggtcaaaattctctaacaaacagcagatatagattagattagattagattagataatgcatatatatgcctagtggttctgcttctctaaatgaaccctaaccaatatactagttaataaagtaaccactgtttgtttgaagatgaaccaataattttagtacaatctagcaaattaaactcttgtttcttcaatagcaagaaggatgatcaagaaaggaactaaatatgaggttacctggaattgcaaagtggaggagcaaaagatggagtctgatccccttaaagcagtttctcaacactggtgttgctaacatgtgggcaggataatcctttgttgtggggctgtcctgtggattgtagggcgtttagcagcgtccctgacctctacccactggatgccagtagcacgcctagtgtggcaacagaaagcaacttcgaacattgccaaatgtctcttgaggggcaaaactgcctccagttgagagccatattgccttaaggcatggcatgtgcctctgtaggagcatcttctctttgccttctatgacttcacccactccacagtcacaggagcacagaactctacaaaatgttagctgggtgtggtggcacgtgcctgtagtcccagctactcaggaggctgaagcaggaagattgcttgagtctgggatgtcaaggctgcagtgagccatgacggtgccgctgcactccagcctgggtgacagaccatgtctatttaaaaaaacaggccgggtgcggtggctcatgcctataatcccagcactttgggaggccaaggcaggcggatcaactgaggtcaggagtttgagaccagcctggccaacatggcgaaaccctgtctctactaaaaatacaaaaattagctgggcgtggtggcaggtgcctgtaatcccagctacttgggaggctgaggcaggagaatcatctgaacctgggaggtggaggttgcagtgagctgagagcgccactgcactccagcctgggcgacagagcgagacaccatctcacaaacaaacaaactctacaaaattttagattatctaatgaatccagagaaagaaagggactcacccagcatcacataactatttagtggtagagctggaaaaagtcaggtcttgtgtctcccagcaccgtgctgtttctgttaaccacacagccctgctttgccatagcactgttactctataacctgacatgtgccgacaggctgctaaatgcagtcactgaggaagacttgtaatgatcctaagatcctgagcaattatttcatcattctacacaaaaccaccaggagcgggagagaaggcaccaaggaagaaatacctttattaggagtctaggcatgtcagaaaaacccagttcagtcacagaaaaggaggcaaatattggtacagagcaagaatccaagtgtgaaaataaaacctccatctaaatatcctaacagaaatgctgctgaatttagcccaggtgaaacttctgaaagctcctggtgaaatgagatttttgcataaagagagagctctccagcactgctgcatctgagcttcttataaagtgacgggtcttggccagcagtagaggaagagataaaggggatgtctcatcacccaagcaaggtcgtctgtgttcaagtgagagaagaaccttagggttttggacagagtaaactggggcagcagagggaaaatggctgaggaaacacaacgtctaggccatgtgtggcataatgtggaggggtctgtgcagtctggtgtgagtgcatctccaggaggtcttgggaaacactggcattccttcctgaggccattttggttctgttctgacttcattcagagcagaactgccaatgtccagcgccaagtcctggatcataattagctgagtggaatgcagtagccaccctatgactcccatacctcttcctttctggagcagtcacttttctcagaccaagtgagatcttacccagtaggggcccaatctagaaatcactcccaccttcatatgagcaccaggtggagagaatcattctcatgactcaaagctttagatctcgatcctcagatgatgttccttggacagaagatcagtctgaagttatctgtgtcaagagtagctggcactgcccatgggtaatgggcccaagcgatgtgatgccgcagctctcccaaagaagagctctctctgctttcacaggcaggagaggaggaaatgaggcaggcttcaaggtagtcaatgccacttaattcttccatcgaatttgctgtggaaagaggaaacaatgaaagtgtgtgatcagttttcacttatccctacagcaaggcagagaaaatgcaacaaaacaaggctcagctagataatgtaaggaaaagaaaaagtagaatcagatcaggaggtgggggatgttgagaaattttttaaaatatatgggggagttcatttattcaaagatgcattaaacacctattttgtattttacaagcctaattttggtcatttgaccctaaggtaggttccaaaatacctaacagggaactaactttcatattaacaaagagctcagtaatttcctgctgtgagagacgaaccagctgtgctccccaggtagctaacatctatttcacccacttcttattttcaactggtaggtcccatccatccccacgagaccatacagtttggatattctgaatctgtaacatgttttcatactttcaatatttagtttctcctacatgctaggtttaactattatcacagcattacagttaagtcttagcttgaggtccccagattacccccctatcataccgcatctcaggagtaatttctgctattcaaagcagtgcttttgacattgtggccagaggagagccttacatccatgtggcttagccaactgcaatccttccagaccttgggaacatacatttggtactattttgtgaactgtctgtctcctgagcctgctggaggggtgaactgtagctgctcaccgagctgctgagaagagcatcaatcttctcctcctctgctgatcctttatctaccttactcctgtatgctagcaactgttgacgatccttcaggtcccggtaggtctgtgcatcaaaacaaacaatacaaacctccaatcagcctctgtacagggttctttttgcccaggatggtctcaaactcctgggctcaagcaatcctctctccttaggctcctgagtagctggaactactggtgtgtgctactgtgtacacatgagggcttatttctttttgtcattatcactttgacccaacgctcaaggagaggctaagaggctatagtgggataacagtggggtccagtgcccacagaactccatgttggagagaagactacacagcttgtatagcttgatttagttctatgaattctccaagtacgacaagtttataaaaacacagagaaagcagtcagagggctgggaaaataatacaggagtgctggtctccaaacaaactcttgccagattattctgtccattcagtcaaacctggtgggagcacctcaggatcttggacagagaatattataatccccaccctgcttcgccactgaggatctaacggaggactcccatttcttggggactcacatcaatgacgacatcatggcacttgaacttagtggctaagttcaacttcgtgtccacatcttccaccagattgacatactcctgtaatatctgtgggaagaggtacttccgattaatgattcaaacacccataaggc

SEQ ID NO: 394 - DNA, 2465 bp, Homo sapiens
agcgtaggggaagggtgcgggagactgagccggcagtggcttgcttggaggggctagggtacccgcctggtctcggctggctccagctgccctgcaggtgcccctgggctcaggtagttagttgttcagccactaatgccttttatcccccatatgggcgctgagctgtggctgttcctggacactgtgctgtccccgtcctgagcaactatgcccccgccccagtaggttcaaggcaaagcagctctgaccgaattctaggcaggggtgggggcacctgcctgggccctgggtccagccgcatccccatgcccagcctttcgcgtcacctggaggccacatcttcccaccacacctgccagcccctgtctctcctccccgctgcccctaactgcagctcagctttcactatagcagtgcttcccaaacgggttctagacttgggtgtttgatttgaagagttacgcatttatttcactatttattgggaaaaaaatgcattgaacccgtgatttcacagacattttgcttaggtcaagactactttttaaaaagggagtgactttcatgaagtcagtttgaagaaggaggttgggagcatgttggtggcagtgatctggagaggctgcaggggccacgagtttgcagatgctgtacttcagcaataaccttgcctttgctaagaccccctccgagggcttcaggggggcctgccaagggggggccttgttcttgttcccaaactctgacttggaagaactcagcttgtggccgggctggtgagggtgtggggtgcgcccttcccttttgggctgagggagagggggccgggaggggttgtcaagcccacccgggaaactgagccctggagaggggaagcagccagcccaggatgcttcagggccctggcagcaaagaagctggggtggtgtggagggccctactccacaccctagagctgtgatgctgagcaaggtgcctgtggcggaaggaactgcccagtcctccctgggggcaggtagacctgtggggatggctcggtccaagcccaacactgcccgctccagagagcctcagccctgcctccctttccacagaggtggttttatgtggaacgaggtaccttgtctggggaagaagtggagctgggcaggcttgactgctcctggctgaccctgagctctcgcagttggagggaagcagacagacttgactttttgcaagtccgcgtgttgctggagggacacgtgtattggagcccagaagaggggctgtgtggcctgggaataccatgtggaaggttgggcttcaagttaacaggatcagacaccagtcaagcagcctcaggtcatcttgcgactccactgagcagcctttcctgttgtcacatgggttcagagcagctgagcagggaacacgtcctaggcaggtctgacgtgaaacctccccttaccctgaaccgtgtgactctgcaagcagacacctcgaggcaggtgttctaggcaaagggatgggcatgagcgaaggctccagggtccacagagcagggagtgtggagaaggtggaagagctgagctcagaggcagagaagctccttgcagggagcactgggagatggcctggcccgtcccaggctcctggaggccccacctgccgatcccaggcacttgaccttgttcctgtgggtgacagagatgagaaccagggaagctgtgatccactggccaggacaagtcaacatgggtgagggttgggcaaagggcccttccttcctccccaaccctgtggtctggggccatggcctcaggcttgtgtctatcacaaaagcacaaacttgccctaacccacatgggcctggctgtggggaaagtggggacccaggtccctgagctgtctgctgggctccgtagagcggtggtgggcaggcaccttggcatctgtgcagagacggtcagtctggccaaatcctcttcctctcccctgctctaccttctccggcaccaggcagccccttaaaggaggacaaagtgtgtaaagcccgtctgctgtcttcccccaaatcctcagctcagagccttccgcttccagggccaaccccagccccgtttgctgcgttgtgtaagggcttggggtcttagaagctgctctttagcccagatacacatactcttttttgtctttgtgcaataatcagtgttcctggcagagcctgggccaagctgcagcctactgaggaggcagaggccacctcctccagaaagccctcggcctgggccgccgccgtgactctagcactctcagtcgctgtacagtttctatggtgtgaatgaacttccctcctagttgctgatggcgctggtacctgctggcccatggcccgggtgtagagaaaccaagcggcagccaccaccagtgttgttttgaataaaagcccagaagcctatttaagaaaaaaaaaaaaaaaa

SEQ ID NO: 395 - DNA, 4318 bp, Homo sapiens
gcttcccggctgccaggctacagaactcgcctcgccactcctgagacatggacaacgccgttgacggactggacaaagcttctatagcaaactcagatggccccacagcaggttcccaaacacctcccttcaaaagaaaggggaaactatccaccattggtaaaatctttaagccttggaaatggaggaaaaagaagaccagcgacaaatttagagaaacctcggcagtattagaaaggaagatatccacacgacaaagtagagaggagctgataagaaggggagtgcttaaggaattgcctgatcaagatggagatgtaacagttaactttgaaaattcaaacgggcacatgatacccatcggagaggaatctacccgagaggaaaatgtagtaaagtctgaagaaggtaatggctctgtatctgaaaaaacaccacctctggaggaacaggcagaagataagaaagagaacactgaaaaccactctgaaacaccggcagctcctgctctacctccttctgctcctcctaagcctagatccaaacctaaacccaaaaaatcacctgtgcctccgaaaggggccactgctggggccagccacaaaggtgatgaagtgcctcccattaaaaaaaataccaaggctcctggtaagcaggcccccgtccctccacccaagccagcaagccgaaacacgacccgagaggctgctggctcctctcattcaaaaaaaacaactggctctaaagcatcagcttcgccatccacttcatccacctcatctcgtcccaaagcttcaaaggagacagtttctagcaaagcagggacagtggggaccaccaagggcaagagaaaaactgacaagcagccaataacttctcacctgtcctcagacacaacaacttctggcacatccgacctgaaaggagagcctgcagagaccagagtggagagtttcaaactcgaacagactgtccctggagctgaggagcagaacacaggcaaattcaagtccatggtccctccaccccctgtggctccagcaccttctcctctggccccccctctccctcttgaggatcagtgcattactgcctcagacactccagttgtcctcgtcagcgttggagctgacctgcccgtctctgccttagacccaagtcagcttctttgggctgaagagccgacgaacagaaccactctctactcaggcactggcttaagtgttaacagagaaaatgcaaaatgtttcacaaccaaagaggagctggggaagacagtgcctcagctactgactcctgggctgatgggcgaatcttcagaatcctttagtgcctcagaagatgaaggccacagggaataccaagccaatgactctgactcggacgggcctatcttgtacaccgatgatgaggacgaagacgaagatgaggatggcagtggagaaagtgctttggcaagtaaaatacgccggagggatactcttgctatcaaacttggcaacagaccatctaagaaagaactagaggacaaaaacatcttgcagcgtacatctgaagaagagaggcaggaaatccgacaacaaattggaaccaagttagtcaggaggctgagccagaggcccacaactgaagaattagagcaaagaaacatcctaaaacaaaagaatgaagaagaggaacaagaagcaaaaatggaacttaaacgcagactcagcagaaagctcagcctgagacccacagtggcagagctacaagctcgaaggatcctgcgatttaacgagtatgtagaagtcacggattctcctgactatgaccgccgagcagacaagccctgggccaggttaacacctgcagacaaggcagcaataaggaaagaactaaatgaatttaaaagcacagaaatggaagttcatgaagagagtcgacagtttacaaggtttcatcgtccataacgaagagtgagactatttggaaacagagactgatcatctttgggggaagccctgcttcctgaaaacctgatattgcactgggatttgaatgtgtgtgtttccgtttaacttgtggtgaaggaagtgtgtgactcagcttggctgggaagtgctcctcacctgtgtggcccagatggctccaacaagcaaaaggaaggatgcagtgactcttgctgcccagaatgcacagcgatggtaagagacaccgtggatattcttcatcagaagctttaatcaaagaagatgagcagaagacaatcactggctccctgttaccagaaagccaaattttataatgcgggtgaaagaaaaatatagattaaaattgctgggcactgaaaaggggtgggagttggaaatcagaaagaaagagaaatatttcattatgttaatgaagaaaagagaaaattgaagcataaatgtatttttgaagtagttattcggtagctgagaacttattaagggatttaggaatttaacctcctgatgtggattcctcaaagacttgatcggagaatactcttgtttcaccattatgttggtacagtatagtaccattattttatgttgtgccagtgaatccagttgccagaaataagtctgaatgttttcatgcatctttttcttaaatgcaagagcttctactgactcttaacaagcatgcttacccaaattttgttgcatgcttttaagtagcattagctatgcacacttgacatttttaaatatccctttcctagtgtaccagccttcacaggataagaggactgggaataaagtcagatgtaatgtgaccctagaaaactgtagcaagcttcagaaataaatcttttgatctttccctatcttgattagatccaaagtcaaagcaaccatacttcacctagagaagacagtattggcaatcatgacacctgtaataaaaacttgaatccaaagtcaaaacttaagcaagatacaaatgtgctgcctgcagttagtcctgcatgggaataaggactagttatttttttagtgctgcatttttttaaagttggattgctgctatttaaaaaaaaaaaaaggacacagatcaaaaaaacacccaaaggcttaacagaacatggaaagttcccactaagttgtgtgtgaggaaatcctcatcttgtattttaagaatctgcagatggcatccatagatacagtacagtatttactgtcaatgcaaaagaatcagtgaggttaaagtagtggaagttttccctatgagcctacagtctgtattgtttacattaagaaactctctattattgtgttgctattttccatggagtcacaggcacactatgacttctgctcccaaatacatatgaccatatgtaaataccaccttgcatttcattgttcttcacaagtgctttgtgcccctttaattaaaaacacatgaaatgaataacaaaacaagacccaaatagagtttattttattctcagagtttggactacaattttctaagatgtttctggttcaagactgtcattttctatttcaaccgaaaagtaagcatttaacccggtgaataaatgtagatcctgccattcattggtattttaaagaaccacttgaaatcggatcattttatttaaaaataaaaaatgttaatgccagttggcctactataaaaagccaggaccatgttagaattaggaaaagtaaccagcattactgcacctcttgttagactctgtgcattaataaaacacacctagagtctgttgtcatttcactaataggataagacaaattttttgctttgaaaaaatttttctgcatgcccaggtgtctgtctctggctgaggttttgtctattttacagtgtttcaatccagccataaaaattaacttgtgattttttttttcccaaagtcatgcttttccttaattatatttttattttattattttagtgtcttgagaaaaataccaagagatataatgtttcttttaattgtctatgcttaatcatctttaaacactttttaaatttctaaccacaagacctctctataatggtaaatgtaagacatcaccattttatcactcaaagtatgttattgaaagtttctatttggttgataaaaggaacaattttttcccacttttgatgcctgtgatgcaattttttattgcctacaatgagatacacttagtacaaaaaatgaaaatctggtatttcaaaattgcatttcttgtataataggtcagatttattaactactcatactttttctttacactaatcgatacatttagaaaaaattttctaagttagagacaagtttaaaagt

SEQ ID NO: 396 - DNA, 425 bp, Homo sapiens
  misc_feature (411)..(411): n is a, c, g or t.
  misc_feature (417)..(417): n is a, c, g or t.
ttatttagtttaataagcatgtggtttaataaggacacactctctctctctctctctctatatatatatatatatatatacacacatatatatatgtaaatatatacgcggagggagcatattctcagagggtgggcagaagggccagggctcatcttacttttaaaagagaataataaggaaaataatctggtcaattccgctgttgctgtttgtatttttttaaaatccaacacatttgaaaccttacatttagccaacactacccaaaaaaaaggtacatcctgtctctggaaatacccatctctggggatgtcaggaattgggaggtaatttttttcaggaaccggtgaccgggtcatgccccaattgccctcccccggaggggtatccaaggccacaccagtcctngggggncaccctat

SEQ ID NO: 397 - DNA, 456 bp, Homo sapiens
  misc_feature (207)..(207): n is a, c, g or t.
  misc_feature (209)..(209): n is a, c, g or t.
  misc_feature (335)..(335): n is a, c, g or t.
  misc_feature (417)..(417): n is a, c, g or t.
  misc_feature (440)..(440): n is a, c, g or t.
gtggagtgtgggattgggctaggggaaccagatgctcagccagccactgagctgggcagctgacatcctttcagggcaagtggcaatccatttcttcatcagccaggaagggcactggtgttgaggccgacatacttatcaagaacagtaactaccatggtttccagtgctttcatgaaacctcagacatgtggccttctggcaacnantctggcaatttcatattgtggggagcattcactgtatccctggggggctgcggctctctcagtttgcagggggctgggaccaaggaaaggaagggcattttcagatttcttatgggggcacagatnttcttacaggaagtttattgatggccattgaaatactttcgagggagatgaggggagggcttgctaatcttctcaggaattncaaagtgatttttggggaatatngaggaatttcttttgg

SEQ ID NO: 398 - DNA, 31737 bp, Homo sapiens
aattcctcatggtaacattgtgagagggagtagaagaagaaaggcgagctcaaatggaattgaaggtgtgatgttgtgatatagtaagaaatacgtatttgttctctgccccaagtccctgacacagagctcctacaacccttgtaatttgctgagcaatagaggtgctagctgcatcttttgttctaatatattgtttttgactgtggttcctgacactgaactcctaaatacttttgagtttcttgggtgattggagcatcttccgttctaatgaggtggctcttggtgggcccctggatgggggctgcttaccagaaagaccaagccatgattagaatcttcgagctttcaggctgggcgtagtggctcatgcttgtaatcccagcactttggaaggccgaggtgggtggatcacatgaggtcaggagtttgagaccagcctggccaacatagtgaaaccccatctctactaaaaatacaaaaattaggcctggcgcggtggctcacgcctgtaatcccagcactttgcgaggccgagacaggcggatcacgaggtcaagagatggagaccatcctggccaacatagtgaaacctcctatctactaaaaatacaaaaattagctgggcatggtggtgcacgcctgtagtcccagctactcgggaggctgaggcaggagaatcgcttgaacccgggaggtggaggttgcagtgagccgagatcgcagcactgccctggcaacagagcaagactccatctcaaaaaaaaaaaaaatagccctcgtggtggtgcgtgcctgtaatcccagctactagtgaggctgaggcaggagaattgcttgaacctgggaggctgaggttgcaatgagctgagtgagattgcgccactgcactccagcctgggtgacaaagcgagactccatctcaaaaaaaactttaaaaaggccgggcacagtggctcacgcctataatcccagcactttgggaggccgaggcgggcggattgcctgagatcaggagttcacgaccagcctgggcaacacggtgaaaccctgtctctactaaaatacaaaaaattagctgggcatggtggcctgcgcctgtagtcccagttagttgggaggctgaggcaggagaactgcttgaatccagaaggcggaggttgcagatcacgccactgcactctagcctgggcgacagagcaagactccatctaaaaaaaaaaaaaaaatttggggataagcgcataaaactataggttgactaaaggtaagtgctattttatagatcttgccatatctcacagtatttatctcaatgtacaattaagggctcaataagcatgtatattatgttcatggcaggcactatgaggagaaaaataaaatttaaaaatgatatattacggttataataagcaataataaataattatatttattattataattaataaatataatgtgttatattgtatattataattatattatttataataaacaataatacattaaaatcaaattaatcgttttgcatcatttattaatggttaattaatgattgatgcacaaaaaaaggggcaattttttttgaagcaaagatgcagtcaaatgaatgtgtagataaatgctgcaagcagtggattaaaattcagggagttggctgtgcacgatggctcacatctgtaatcccagcattttgggaggccaaggtgggaggatcacctgaggtcaggggtttgagaccaccctgaccaacatggtgaaaccccgtctctactaaaaatacaaaaattagtcaagtggggtggctcatgcctgtaatcccagctacttgggaggctgaggtgggagaatcacctgaacctgggaaccagaggttgcagtgagctgagatcgtgtcactgcactccagcctgggcaacagagagagaccgtctcaaaaaaaaaaaaaaaaaattcagggagttcaaactcctgtgtgacggggaagatgatttgcacaaaggcacatccacataaaaagtggcacattcaggaatacactcagcattccagcattcttgattcccagacttaagattttccactactctatgctgctgtgttggagagtagtgagaagtaaggctggacaggtggagcctgagggggtttgggccttgagaatccaagctaaggtacctgagtagagaagcatcacagaagaggcactagccaatggaggaaagctatcatgggtttacacagtgaggaaagaattgatttctgggccaggcatggtggctcatgcctgtaatcctagcactttgggaggccaaggcaggcagatcacctgaggccaggagttagagaccaggttggccaacatagcgaaacaccttctctactaaaaaaaaaatacaaatattggccaggcatggtggtgcatgcctgtaatcccagctactcaggaggctgaggcattagagttgcttgaacccaccactgcactccagcctgggtgacagagagagactccgtctcaaaaaaaaaaagaattgattccattctatagtcagtaaacatctaatggtttgacaagtattcagcatcagaatgagaaatttggcattaggtaatttataataaacacaaaagataaataggaaatatgacaatatggcctggatttgatagcagacacctgtgcctaatggatgatgggtgtctgccaacattcataagcttcaaagatgcatcccagccacagacataaagcactgatatgtaggatgtccttgggtacacagggcagtttcctatgctagggacatatcttgctttaatttctcagcaatgttttgtacttttcagtgtagaggtcttatacatcctccatgagatatatcccatggtattttgtgtttctgatgcagttataagttattttaaaattttcattccatttgagtttctttatctttccctttttaaaatataattcttttaagtatttacatatgttggacatcatattagataacatataaatttttttaaccatcaaatatgaaactctcagttttaaggactttcttaaaacttgaaaagtgttgctgcggtaaagaaagaggggaaaaatatttgcatagagacacagttgaaaatatgaatccccttattatgaccataattttttgttaagacatggaaccagaagattttgtatcagaatatagttgattttgtactagcaatcagtgataagacatatgattcagaatagctagctgtactcttgtctgatagttttttattccagatacaaagcaaaatttaatataccaaatttaattttgccactggtaaccattataaaagtgaagacagttcttcaagaatattttggttttcaaacaaagccatactaaaagatgcaaaaacattcttaaacatccaaaatgtaattaataacattataatataatttaaatactataaaaaataacaaagttaaagcaccagactgcctacttattttaaaaagttattaaaaagaaaaagatgtgtgtggcagacattaattgcctactaaaaatccattcttccctgctttcttattaatacagtttgtttgtttgttggttggttggttggttttgagacagagtctcgctctatcgcccaggctgcaatgcagtggcatgatctcgactcactgcaacctccgcctcccggattcaagcgattctcctgactcagcctccggagcagctgggactaaaggtgtgcgcaaccacccggctattttttatatttttagtagagacagggtttcactatgttggccagactggtctcgaactcctgacctcaagtgatccgccggcctcggcctcccaaagtgctgggattacagcggtgagccaccgcgccagcatatacagttctgattagtgtgggtgtcaatgtcccctgttaaagagtacctccccagactcccttgctattggtgaccagtaacccacctctggccaatgaaaaacaagtgtaattcactgggtggaacccctaaggaagtgtattaaagatggccgactcagcaccaggccttttgactttctcccttactcctttccctgtttccttccgataatgtagctcagtgcttggagatggagcagccattttgacaccgtgagaataaaaacatgtaagaaagccaggaggatctctggtctcagatggcagcattaagctgccattactaccctagtttacctacttgcgtgcctgtttatataagggggaaaaaaaaaaaactaaaaccttttggttaatcaactatgtcagggaaggtcctcgccatcaggatttctgattcagtgggctggaggtaggacccaggaacttacatctttcacatgagccccaaatgattcccatgccagtaatccaaggattattttacagaaactctcctttggtaggtgtgaattggaaatttaatgttaactggggagtcaagaggattatgaacttgggtgggagggtagcaagtcaaatgataaattgccagtggcatacaaaagtttacaaatgaccgcttaggcttgatgttatgatttactaacattttccttgaattttctaaattatgctatgtcacagagaaatgaatgctgatggtaaaactgtaaattgtctgcagcagcagattaagtccttcaatcctggtttaactttattatgaaatcccattgaataactgaaacaagagtattttcttcctgaggacagttgctctataaaatattgtcttgggtgaactataccaagaaatataagatctatttgattcacagaagtgcagttcaagcagttctgtttctaaaaggcaatactaaatataataaatggatgccacaccagtttaaatgtataaatggttttcattgtcaacatcaatgccagataattcaatttgtttcttcctgagattatgatcttatttagacattaacccgttttatttatttatttattatttatttattgactcaggatcttgctctgtatcccaggctggagtgcagaggtgccatcatggcccactgcagcctcaaagtcctgggctcaaaggatcctcccacctcagcctctggagtacctggggactacatgcatgcgccactacgcccagctaatttttttttaaagatggggtctcggccggatgggatggctcatcacgcctgtaattccagcactttgggaggccaaggtgggcagatcacttgaggtgaggagatcgagaccatcctggtcaacagggtgacatcccgtctctgctaaaaatacaaaaattagctgggcatggtggtacgtgcctgtaatcccatctcctcaggaggatgaggcaggagaattgcttaaaccagggagtcggaggttgcagtgagctgagatcgcaccactgcactccagcctggtgacagagcaagactccgtctcaaaaaaaaaaaaaaaagatggggtctcactatgttgcccaggctagcctcaaactcctaggctcaaggaatcttcccaaagtgctaggattatagacatgagccactgcacctggtccccagttttattttttaaccatgacagctgtagctttgtctagcgacagctcccttctgaaaacaaatccagcaacatactgttgttacacaaagatacacttatgctattgttccttttctttataagatagtaagctccttaatgatatttttttaagatgggtatctcactatgctgcccaggttgatcacaaactcctgggttcaagcaatcctcccctctcagcctccctagtagctgagattacaggcgtgcaccaccacacccagttcagctaacgcatttagaagtaaattgtattgagatgtagggttataattcttacactgaaaagttttgtaaagtgtgtatatagcaggtataaaattattacaatggaattctaactttttttggtggggtggggtgggtgggtctcactctgttgcccaggctgaagtgcagaggtgtgatttcggctcactgcaacctccgcctcctgggttcaagtgattctcctgcctcagcctcccaagtagctgggactacagttgcctgccaccaccatgcccagctactttttgtatttttagtagagatgtggtttcactatgttggccaggctagtctcaaactcctgacctggcctggctagtctcaaactcctgacctgatcacctcctggccgaggtgatctgcccgcctcggcctcccaaagtgctgagattacaggcatgagccaccgcacctggccagaattctttcttatgcaagagttaggcacttaagtgtgctcaggtatagaccgaaattaactttatatgtctcttaaattatccatgcagtgtaatacaaataatagttgtccctggtcttcaaagacatgaatccttaaatacagaatccatactttcacactttcagagctagaaagaactgagaagaactgaccgacaggttcagactgcccatatctgccaaaggcagggcattcagaggaaaagaaggaagtcacggccctgcagcagttcagtctgttggggatgacagcttgtaaacaagtaattatagtggctgtatcacgggcccataaaggagaaagctgtgcgtttgagccagggagaagggcaggcagcccgggaagacatctgagaggaggtactggcatgagagcgatattgtaaaggatggcaaaaataagtctgtgtgtgttgctcagacagaggaagggcgtgacgtggggcagggatcatttcccaaggccaaagcacagggtgtttttgaagaggggctagatatcatgtcagagagattaagcccacagtgaaaaacacctcaaacacaatgccgagaaattttaactttattctgtaaataatggggagccattgaaggatattcagcaggaaaatgaattgaccagatacgcatgttagaaaatttcctctgattttatgtgttgtttacagtcctttttgtatatcagtcagtatgagaaccttcgtaaggaaattgaccccttaacataaccactctaatttctttatatttcctctgaaattagcacacaaaataagaacaacttcccatgtacctctatgtagtgttctgattatgacccttggagacttctctctgaattttttttttttaatcaatgcaagtccgggtgcggtggccacgtgtaatcccagcactttgggaggccaaggcgagtggatcacttgaggttaggagttcaagaccagcctggccaacatggtgaaacctcgtctctactaagaatacaaaaattagctgggcctggtggtgggcacctgtaatcccagctactggggaggctgaggcaggagaatcaccccaggaagtggaggttgcagtgagcagagatagcgccactgcactccagcctgggcgacagagtgagactttgccaaaaaaaaaaaaaaaaaatccatgtaaaaaagaatttattcttttaatcttttataatttttatttttttggtagagagggaggctagctatgttacctaggctggtcttgaacttcttgcctcaagcaatccttctgcttcagcctcccgaagtgctgggattataggggtgagctactgcacctgaccccaaaaaataatttaatagaaactgtgtatccagttcttttcattcatgtagttcctaaggccagtttttaagtggatctgtatagagaaaatgttaccatgagaatccaatgtgtattttaaatgtaaataaccactaatggtgaaaataatgaaaaataagctcaaatctctagtaattgtgcaatacttgcaattatatgatactgatttgattgttctatgcaaaggaaatttagaatcaaacccagttataaaggaaataattcgtaggattggagtcctgaataattatcccatctgtccacaggccagacagaggggcagcctgtttatctatatttatcatatacatatgtgtgcatttatggaatataaaagcacaaatagagataatctctaaactgaacatactttgagacacaatcaaaaattcaaatagtaggctgagtacagtcgctcatgtctgtaataccagcactttggaggccgaggcaggtggatcacctgaggtcaggagttcgagaccagcctgaccaatatgacaaaatcccgtctctaccaaaaatacaaaaattagccaggaatggtggcacgcatctgtaatcccagcaactcaggaggctgaggcaggagaatcactcgaacccaggaggtggaggttgcagagagccaagatcgtgccactgcactccagcctgggcaacaagagcaaaactctgtctcaaaaaaaaaaaaaaaagataccattccttctgaatgcttcagaggagaatccatttccttccccttcatagcttctagaaacttcctgcattctttggttctttctttgcctcattccagcctcttgcttctgtagtcacacctcctagtactcactttgttcctcctgcctttctctcataataaccctgtgattacactgggcccacacaagtaatcaaggctaatctccccatctcaaaatcttcaatttaataacaactgcaaagcccctttcactgtgtaaggcaacacattcacagttccgggagttagaacatggacatcttcggagaaccattattcagcctaccataaggtctaatgttcctgaaaatctcctgtgctgcatgaaccttattttgaaggttcatgaacatctgaacatccccaagaggccaagcccacagtgcttcactagaaagtcctcctggaccatctcatttcaggctagcaaatcctgacagactctaaacaaatattgttattcatatactttgttagcattcaggaaaaaagcagcggacactagaaaggaggatcgatttattcttattccctttgttttcttttcttgttttgttttgttttgttttgagacagagtctcactctgttgcccaagctggagtgcagtggcatgatcttggctgactgcaacctccgcctcctgggttcaagcaattctcctgccttagcctcccgagtagctgggactacaggtgcatgccaggcacagctaatttttttttttttttcagtagagacagggttcctcggtgttagccaggatggtctctatctcctgacctcatgatccgcccgcctcagcctcccaaagtgctgggattacaggtgtgcgccaccatgcccagcttccctttaaattctttcctgacatacaagtctgtggcctgcgtctctgagcacagggtggctttcctggaatcctggaggaatggaattgggggatccagtcttgtcctctgttgatcaatatcttctatggttccctatcaccttctggactaagcccaaggcctgcattgtccttccaaagccttttgagatctgacccctatctatcatcaattctccctgagcaccccctagtggtactttaggcactagcactgtcaaagtcctgttgatgtccaatcacccatattctctcgcgcccccactcccccacccaccatgcttatggacacattgttcccgctgcctaaatgaccatctggcaaatgaaccttgtctgtgagcaaacgtttcctttcatttatcctacctcactgccttagtaaaacatgccctcagattataggttctcctctctatctgctctacagcactggtgattctgtaattattctagtgaggaccagctacataattcgtggggtccagtgcaaaatgaaaatgaggggtccccttgctccagaatgacggcatctgtttgccatgtacctggatgcaacctgcccctggggagctgcccttgccccatccttttgagccatggcacggtcctgcatctccaataccaaatctgactccaaaactgtgtggtgtgacatacaagtgactgaacgcttcctggggagctggggttgggggcacttcaaccaccacacagcacagcttcatcaaaatgcagcttgcgacttctcccccaggtgccttcccgctgctgcgggcctctgctccttcacttccaacatctctcaaaataaaaatccctcctcccgctctgagcgattcagctctgcctgcagcttgtacatgtctctcccctggcaaaacaagagctgggtagtttagccaaatggcgccccctcgaggccactgcaggtccttcattcaccccgtcacatacagaggggttctgagtaaaaacaaaacgttctgccgctcaggccagtgtggcaaacactcagccaagcctcaggatccttccggggagagtgtaggtagacagtgtcctgctcggggggcaggggtgtcccaagggctggcccgcctgctgtctgctcctcctggcccctggtcaggcggcagccagagtccctctggacctgcatcctcgccccagcagaagtcttttgtccaggggccaaaaagccagagattccgcaacaagaattcaaagcaaacacaacaaaacaaaattcatggaaagtagatgactgctaagatatggcaggggggcctggagggagcctccggctctgacctgctctgggacgggccgccttctcctccgcatgttgctcagtttctgcccctgacgctggagctcacagagacgacttccttgtcctggttctcaacagagctgtagctgactctggcattaccaagcctccccacatgcccagccccctcactccaaaatcctactggctgtaacagagaatacctttgaaccaagattctgttttaatcataatttacattgttttctttccaaaggcccccttgtataccctccctaacccacaaaactgttaacattgtcttaaggtgaaatggctgtaaaatcagtatttaactaataaatttatctgtattcctctttcaaaaaaaaagaggagtcccctgttccaaaactattaagcatttcaagacagcaacagcagagcattaaaccgagcatgggatcctcctgagccccgtgccatgtacgactgcccagcttgcacacccatgatgccagccttgaccctagcgtgtgtgtactaaggacagtgaagacagaaactgcatctgtgatccatgcgttctccaggccttggtcagtgccccccgacccctgcacacacacacatagacacaaaaatgacagctgagtggatgtacaaatgaatgaatgagcaatgttgaagatagtttttattctacagaagactgtatgcatgtagtagtttcctaaggctgccataacaaatggccacaactcagtggcttgaaacaacagaaatttattttctcatagttctggaggctagaagtccaaagtgaaggtgctggcagggccatgctccctctgaaggctctagggaagaatccttccttgcctcttcctagattctggcagctctggctatccttggcgttccttggattgcaaccacatcactcccatctctgactccaccttcatatggtattcttccctctgcgtgtatcttcaggcatctcctcttcttataagggcaccattcattagatttaatgcccacctgaatccagtataacctcatcttaactatttacatctgcaaagatccccatttccaaataagatcacattctgagattccagatgaacttgaatttgagggtgggcactcactattcaacccactacatttgttaataggacattcttcagaatgcctcaagggtatttgttgctgatatatgtttaacaatgacgtgacttgtaacttaattttatttgccaagggaacctcgaaggatccataaaaccatacaggctgtaaagaggcatgtataataaatgaagtataacctggggaactaaacatttttagatgtggtcatgcaaccagttattgttgaaatatcttggaaatgtgaagggcaacaacaacaacaaaaataaacaggaagatgcccaattttccatagaaaacttaagtgaaatccagaactgcaaagttttccgcctgcatttacacaatggcttcctgggttagggcttcctgtagcagagccctaacaccattgattccccctccttctaggtggagactaggggaaagtctagcatggctagaatgcccctgaggctcagcagtttgcataaattgtttattaagggttaggaacagtctatcactttacatatgttaagtagatagggatctcagccaggccccttgggggttttaattaaaataaagtgttaacatttatttttctttgtggaatgtttattgtttcattaattgtttaagctatcacagaagcatggagggtttaaggttttgttaatgtgttcccctgtaagagaaagaggagactgttggttgggtaataagaggaatcatgtttaatattcatttgatagtaaaacagtttaatattcatttgatagtaaaaacaaggggtctatggaccatttcccgttccccaggtgcccagccaggtcacttggtctcttttactatttatttatttatttatttattttggagacagggtctcactctgtcacccaagctggaatgcagtggtaaaatctcagctcactgcaacctccacttcctggatccaagcaaatcttgtgcctcagcctcccaaatagctgggactacaggcatgccccacaatgtccagctaatttttgtatttttagtagagacaggttttcatcatgttggccaggctggtctcaaactcctgacctcaaatgacacacctgccccggcctcccaaagtcctgaaattacaggtgtgagccaccgcacccggccagtcacttagtctcttaagtcacttagtctgcctttaacatgagaagcagagacataaaggctttacattagaacttctgactcacagccaggctcagtagttactgccagtaatttgagaactttgggaggctgaagctagaaggttccttgaggccaggagttcaagagcagcctcggcaacatagcaagatctcatctctacaaaaacttttaaaaagcaatcttagctacttgggagacagaggcaagaggatcacttgaggaaaggaaagaaaaacttctgagtcaagaaagagagagagaagaaagagagagagaaagaaagaaaagaaaagaaggaaggagggagggagggaaggaaggaaggaaagagaaagaaagaaagagaaggaaggaaagaaagaaagaaaaagaaagaaggagggaagaaggaggaggaggagaaggaaggaagagaaagaaagaaaagaaagaaagagaaagaaagagagaaagaaaaaaagaaggaagactgacttttgagtcaccgaatgctaatagagttcttctgtgggcatccatgctgtcatattccaccttgccaccctttcccctatttcctccaagtgcagcagaagatgccgcagcctctcaaccaaccaaccatgctagtgtgtggtggatttatttgtagggagctgatggttctggtcttttctctcaagactcatttccctgaaatgggctatagactggaactgctttgctgccccagtgttgccaacgccccttgtctggaatgtattcctccggtgtagcctcaagggcattgttaggaagtatgataagataaatctctgttgctgtcaggttgtgtccttagatgcattctgaataccctctctcatgggctgagtctctcaaccccaccatacacaaaatggagcaaagatttttatccaggactggatccaggacagtgggagattagcaggaccaaacaacatttatttcatcattcatttcattgtgtcttccttttttcatgtattcactagatcagcaagtatttattgaatgtttgctatgtactggtcactgggctaagctctggaagagacaatgatgaataaggctaaataagacagtgatgaataaggccattccattttcttccttgacttgctggaagaaaatggaaatatataatatataagtaatgagcaaataaagaagagagcaggttataagaatgcactaaggaaataaggaggatgctgagaaaaagcagcttggaaaagggcactttaggtggtcaggtaaggctgctctgaaggaggaggtgacatttgactgagattcatgaattaaaagggatccctgtgaagatctgaaggagagcatccccaagagcggaagcagggataaatgctgtcggacagcagaggacctggatcatgttaagaacaaactgcagaccaatgtggctacaggagagtgagcaaaggtgagattgatgtgagatgagtttataaggctgggcaggggccagattgtgctggacttaggtgggggcatgtggacaatggcctaagtacagtgggaagacagtggagggctttaagtgtatggaaaatgaattccaggtacaaatgaggattgcagtttctggttagagggttttaagtgcatggaaaatgaattccggatacaaatgaggattgcagtttctggttagaaatctgggcaggagataatggtgactgtactaggatgaaggaataggtgtggagagttgtggacacattcaagatatgttttagattagcgttaacagaccttgttggcagaatggttgtagagaattaggaaaggaaagatgcaaggatgactcttacaactttttgagaagctggacaaccaaggggtcaaagaagaaatagaagagaaattataaagtattttgagacaaaaatgaaaacagaacataccaaaactgacaggatgcagcaaaagcactactaaaagagaaattcagagtgataaacacctacattaagaaagaagaaagatctcaaataagcaacctaactttacatttcaaggaactagaaaaagaaaaacaaatctaagcccaaagttaggagaaggaaagaaataataaaaattagagcagaaataaacggaatagaaaatgaaaagcaatagaaaaaaatcaacaaaactaagagttggttttttgaaaagataaacaaaatcgacaaacccttaccaagactaactaaaaaagagaacactcaaataaacaaaatcacaaatgaaagtagaaactttacaactggtcctacagaaataaaaagcataataagagactactacgaacagttgtgtgtctatgaaccagataacctggaagaaatgggtaagttcccagaaacatacaaccaagactaaatcacaaagaaataaaagatttttttttctttcttttttttttaattgatcattcctgggtgtttctcgcagagggggatttggcagggtcataggacaatagtggagggaaggtcagcagataaacaagtgaacaaaggtctctggttttcctaggcagaggaccctgcggccttccgcagtgtttgtggccctgggtacttgagattagggagtggtgatgactcttaacgaccatgctgccttcaagcatctgtttaacaaagcacatcttgcaccgcccttaatccatttaaccctgaatggacacagcacatgtttcagagagcacagggttgggggtaaggtcacagatcaacaggatcccaaggcagaagaatttttcttagtacagaacaaaatgaaaagtctcccatgtctacttctttctacacagacacagcaaccatccgatttctcaatcttttccccacctttcccctctttctattccacaaaaccgccattgtcatcatggcccgttctcaatgagctgttgggtacacctcccagacgggctcctcacttcccagtaggggcggccgggcagaggcgcccctcacctcccagacgaggcgactggccgggcggggggctgacccccccacctccctcccggacggggcggctggcctggcgggggctgacccccacctccctcccggacggggtgcctgctgggcggagatgctcctcacttcccagacggggtggctgccgggcggaggggctcctcacttctcagacggggcggctgctgggcagaggggctcctcacttctcagacggggcggttgccaggcggagggtctcctcacttctcagatggggcggctgggcagagacgctcctcacctcccagacggggccacggccgggcagaggcgctcctcacatcccagacggggcggcagggcagaggcgctccccacatctcagacgatgggcggccgggcagagacgctcctcacttcctagatgggatggcggccgggaagaggcgctcctcacttcctagatgggatggcggccgggcagagacgctcctcactttccagactgggcagccaggcagaggggctcctcacgtcccagatggggtggcggccgggcagaggctgcactctcggcactttgggaggccaaggcaggcggctgggaggtggaggttgtagcgagccgagatcacgccactgcactccagcctgggcaccattgagcactgagtgaaccagactccgtctgcaatcccggcacctccggaggccgaggctggcggatcactcgcggttaggagctggagaccagcccggccaacacagcgaaaccccgtctccaccaaaaaaatacgcaaaccagtcaggcgtggcggcgcgcgcctgcaatcgcaggcactcggcaggctgaggcaggagaatcaggcagggaggttgcagtgagccgagatggcagcagtaccgtccagcttcggctcggcatcagagggagaccgtggaaagagagggagagggagaccgtggggaaagggagagggagacggggagagggggagagggggagagggagagagggagagagggagagagggagaaataaaagatttgatcactaccatgaagattgagttactaacccgaaacctcccaagaaagaaaggcccaggactagagggcttcactggtgaattctaccaaacatttaaagaagaaataacaccaatccttctcaaaccttgaaaaaattgaagaagaaagaacatttccaaactcattttatgatgccagcattataccgatatcaaagccagacagagatatcccaagaaaagaaaaccattggccaggcgcggtggctcacgcctgtaatccagcactttgggaggcggaggtgggtggatcacctaaggtcaggagttcaagagcagcctggccaacatagcgaaaccctgtctctactaaaaatataaaaattagctgggcgtggtggtgggtgcctgtaatcccagctactcgggaggctgaggctggagaatcacttgaacccaggaggcggaggttgtagtgagctgagatcacagcattgcactccagcctgggtgacaagagcaaaactccgtctcaaaaaaaaaaaaagaaggaaagaaagaaggagagaaagaaaagaaagaaggaaggaaggaaggaagggaaagaaagaagaaagaaagaaagaaagagaaagaaaggaaagaaagaaagagaaaggaaagaaagaaagaaagaaaagaaagaaagaaagagaaagaaagaaagacagacagactattcaccaacaaccctgatgaacacagatgcagaaaatcttacccattttgtcttgggatgatgatgacagtgatggtgttgatgataagcagaatattttttgtaacctctgaggaacagagaagcggccagaaatttttgatcattcactaatgtgccaggcactatacagaagacttcatacattatcatttttaactctcctataaccctataatgtaggctctattattaacaccaatgtaaaaatgaagctgaagcacaaaatgtttaagtgacttgccccaggtaacacagtagaaagcaacaaggacagagagctgggctcagtggctcacacctgtagtcccagctactcagggggctgaaacaagaggatcacttgagcgcaggagtttgaggccagtctggacaacatagcaagactctgtctcttaaaagataaaaaagacacagagagaaatgaaggcagaaatggaatcctacccacaagaacctccctaaaaatccaagttcatgactaccttgtttcctctgcatccccattacctaacacagtgcctgttatagagtaggaactcaattagtgttgattgtaaggctatgggtaggtgtgcctgatgtcaagtccatacaccacgatgtccatacacagatgtggcaagaaaataatataaaaccactcgtgaagtcatgactccctggctcacctatttttcccccctctatctgcctttctgctttaggtcaggcccagtgtagcatcttcacgatttcagttagagaagagagagctgctggcacctatatgaaagaggacccatgggcaggagaagagatgattatgagcaaatccagggagagctatttcctgagacagagctgaaaataaaccagacttctctatgaggagatgataatagcaagtaacatcttccaagagctaatatgctctattcaattaatcacaaaaatttatgagttggggactagtaacataatcaccattttataggtgtagaaactgcaggaaggtaggctggggcaaagtggctcacatctgtaatcccagcactttgggaggccgaggtgggtggatcatgaggccaggagttcgagaccagcctggccaacatggtgaaaccccatctctactaaatatgaaaattagtcgggcgtggtggtgggtgcctgtaatcccagctactcaggagggtgaggcccgagaattgcttgaacctgggaggtggaggttgcactgagtcaagatggcaccactctagcctgggcgacaaagtgagactctgtctcaaaaaaaaaaaaaaaaaaagagaaagaaagaaaagaaaaaaaaagaaattgcaagaaggagaggttgaacgacctctctaaggcaccccggtaggtggcacaactggggctcaaatccaggcagtccctctgctcatgaccattacaccagaatctgggaggcatgtactgtgggtgagatgactcttcattaatcggcactggggagaagccacactaaaatatgctcatgaaaatgcaactctgcaagagaaaaatgtctgcctgttgcttttttaatggttgaaataaaattatattcctgtcaccaccaagagaaaggcttagagactggagaatggcttagattatgcaattgcttctttgtccttgccaaggtaaggacattttatctaatggacatgaacactgtcatcactaaaaaagtacattctgtctcaggatttggtgaatttgttttcccaaattaatcttctgcaactgtgtgatactgtctttctctctagtcagactagtctgttcacttcccccaaaacacccatttctgggccttttctcaaaccagttatcttcctaggatgttctttttctctctctccttatcaaaatcttaccttgtttcaagtcattcagtaacacaaggtacattttagattgtctgagatgtagcttgttaaatacaagttcttgggtcctacctccagagattcgtgttcagacttgcttaaatcttgggtgattccaggtattagatttttaagcatgctccccagattctgaaggggtgtgcgtgcatgtgtgtgtgtgtgtgtgtgtgtgtgtgtgtgtgtgtgtgtgtgtaggtaggtagtgaggtcattctgagggaaactgctttggtaatgggaatttaaaagatggttggaggccagaagacctctgcactagaaagagcatttgaagccatccagttccgcattataaattttcttgtgaggaaactggggcccagagaacgtagctctaccttgtaaatttactaatgcagaaactgaggcccagataatttaagtgacgtgcccaggatcacacagttatgaattggctgagctggtacagccacaatcccagctctgtctttctctgacacaagattttccctagattccatagcaataagccccaaaccctgccctgaccacacgatacaccaccatcaccacgggaggattgcctaggctgggttaagacccacacacgagttgtgtggtcttgtgcaagttacccagtctctcttgggctcagtttcattgttaatagagcaggtataaaactcagctcacagggctgttgatatggtttggctctgtccccacccaaatctcatcttgaattgtgtctcccataattcccacatgttgttggagggaccaagtgagagataattgaatcatgggggcagtttccccatactcttttttgtggtagtgaataagtcccacaagatctgatggttttataagaggaatcccctttcgcttggctctcattctttcttgcctcctgccatgtaagacgtgtcttttgccttcatcatgactgtgaggcctctccagccacgtggaactgtgagtccattaaacctctttttcttaataaattacccagtctcgggtaatcaagagaacgcatgagtggcctgtgttgcacacattccatttatcagcagcatgaaaacggactaatatagctgtaatgcagattaagtgaaatagaatgcaagacttttcatgggacaaggcctgagaaaaatactgagaataaatgtaggctttgggctacattttggagtattaatttacattgttttctttttcccagttattccttttccctttgttgtcatgcatgtttgtggcctgctccctgctggtcaccccaggatggatgtaacaggagagagtagaaatagcctgcccatcttcctgaatttttttcccgaaagcctaatccccaggatcaggaaggaatcccagggacaaactaaaagtctttacaagaagcctggggacaaaatgaagaaaggaaaattctgcttgggatgggggaaatgagagatgagaaaggtctataggtcctggctgaagagggtaaagaaagaaaaattctgatgggacggggatttgagatttgggatgggggaaatgagggatgagaaaggtctataggtcctggctgaagagggaagcaggtcctacatcccaatatagtctctgggtttatctgggcaggcagaaatacaggaagactccttcaaaagtcccttgacccaagtgcagtgaggaatgcttagaggccacatagatgtagacagtggtaatcacagctgatcacccaccatccttccacactttggcatcatcataatcttaaaatcacagcaaaatctcaggtatcaggagggcttgcataactatggcccagccctcagtggagagaagtccagcaatgaggtcaggccaggtgcagtggctcatgcctagaatcccagcactttgggaggctgaggtgggaggaaatcatttgagcccatgaattaaagaccagtttgagcgttataataagatcttgtctccacaaaaaatgttgattacatttttaactgaaaattttaattttaaatttaaattaatttaaaatttaaaccaccagtatggtggtgcaggtacctgtagtcccagctactcaggaggctgtgatgggaggatcacttgagccaaatagtttgaggctgcagtgagctatgattacaccactgcactgcagcctgggcaatagagtgagaccctgtctcttaaaaaaggtgtggggggctggggggatgaggtcattttctatcaaccaggaggaaggccaccttgagatagaaataaagttgaattatagaaaataaggcagccactacttgttccaaatgtaggggttaagtgtccactcacaatcaagagaacgcatgagtggcctgtgctgcacacattccttattgcactgctagctgggactccctgagctgttaaggttgagggaacagtgcaagctcaggcccttcttccagcacccccatgccattctcagaacagccaggagcagatccaggttcaatgcggcattgaacttaaacatttgtggccctgtttaagaaaaagaatcaaaattacacatacaaagttaggaacaaaagtaacctctgctggcttctgaagtcatgaatggctcctgctgctggcaccagccttcgagtgcccacggcccgtccctgcgtgacaaacacacctgcagccggccctcagtgctacctgcccctagaatgagagataataccaaggaccttaacagccctggtagtcactgcagtgcttactgccaagggtgatgaacaagttgtccatgttccagagcccagctgcctgagccaacaagacatagcacctcccagaccccggagcaggcatgtagcccacatttggccctgctggagggagagccacagtgtactacagcttagtcactgtaatcacaaaaatgtggtaatggagccacaatataaaacaagtaaactcagccttcaagaacacattgtggggccgggcatggtggctcattcctgtaatcccagcaactcaggagactaaggcaggaggatcacttgaacccaggaggtggaggttgcagtgagctgaaattgtgccactgcacttcagcttgggtgacagagtgagactgtcttaaaaaaaatgctttaaaacttggaatgtaaatacataagtgtctactatattattttcagtacatttgacatattttgtaattaaaataaacttaataatatatttaaaaataagtaaataaatatttccaaaagaagactagtaatagtctacacctcacagaaaccttagaaaacttaattaatacaaagcattggaatcagggccagggacatggtaaacacttgcagaatattcattgttttcctcagtgccactgttttacataattttaaagctttcttttcttttctttttttttttttttaactgtcctagaagtcaaccgagatgggacagaaaggaaagaaaaccctggaaggtcttcttgaagaaggcgatcctaaatctgaatccaaattttcagaaatgtgtctcctgggtgaaggtgaaggtagcaagagtctgcccagcaaccccccaaccccattttttttttttttttctgagaccagtggagtctggctctctgtcacccaggctggagtgcagtggcgcaatctcagctcactgtaaccttcgccttctaggttcaggcgattatcgtgcctcagccttctgagtagctgggactacaggcgtccgccatcatgctcagctaatttttgtatttttagtagagacggggtttcaccatgttggccaggctggtcttgaactcctgacctcaagtgatctgcctgcctcagcctccgaaagtgctgggattacaggtgtgtgccacagcacccagccccacccagctcaccccagcctcttttaacctcgcctgtctgactcacatattttcccagctgctggtctttgctcttcctctcctctctgtctttcatgtaaagccctctccagaggctctgtggttcccaggggcctttcacgcactgcctagagaaaggccacttactggctagtgttcgccactctccctcatgtgtccttgattacagggaccaagaggtaaaatcaaatcattttccagcctccccagtagtcaggagtagccatgggaacccattttgccctcgagaggcgggcggaagtccatggggcagatgcttcttaggtctttctgctctgtcttaattgctcaagaagcccagaagtccagcagccgtctcaaaaccacaaaaataaagggtcccaccgaggctgagaaggagcctggcggactgaggatttccctttgcagcaacaccagccctggacccctttaatgaaaagtaacggcaaaaaaccgtgattacttttgcaccagctcagttaaaaggggtccagggctgcaaagggaaattgtgttgaactttccattacttgttgccaaacacactcacgcacctgactatcctgtcagtaagggattgttttttggtgtttgtttgttttttgtttttgttcgtttgttttgagacggagcttcgctcttgttgcccaggctggagtgcaatggcgcgatctcggctcacctcaacctccgcctccgcttcccgattcttctgcctcagcctccggagtagctgggattacaggcatgcgccaccacgcccagctaattttgtatttttagtagagatggggtttatccatgttggtcaggctggtctggaactcccgacctcaggtgatccgcccgcctcggcctcccaaagtgctgggattacaggcataagccaccgcgctaggccataagggatatttaatggagatgcactgacaaaacctgtggggcccttgaggcgccctggacatccctccatctgaaggccaaataccggacattcctcaccaccctcagctgcctcggtgcaggtgcctgctgccatctagtgtccatcttttagaactacaccactgctttgggacatgaactatttttccttccgcactttcttttttcattcattcattcattcatttgttcatttatgaaaggaaaataaaacctcaggatctcgatttagcctaccaaaaggaaaaaagaataagccaaaagccgagtcacgcaagaagctgccttttcttttgttcctaagcagatgctacagataaaaggccagatatctccagctgctggttgtccaccttatcttatcaagtgccgatttactgagcatgagacaaatacataactgactattcccctacctgttccttgtctcttgcaacatgtggattctgtgatgtgactggaccttccctctttccagcctgcttttcccctttagatattgaagcccacaaaatcatctttggagaaaggcacagatcgcagactgtttctgtggtttctatattcccttcttctggcgtgtgccttacattggcttctaaactttacaaacttctaaattgactgagacttgtgtcagacatattttggttgacaaattggcatccaacagaagggactctgagtggaggtggtcctgactgttgagaaatctgactttggtgcttggtaccagcccgggctacttttattgctcaaactgttacaggaaaggggtctggagccagaccacagagtgagttcttggatctctgacaggaaagaattctgggccagtcacagagcacagtgaaaaaagcaagtttattaaagactactctattacagagtagggcatcctcagaactaacaacaagaggaggccaggcaccgtagctcacacctataatcccagcactttggaagatgaggtgtgacaactgcttgagaccaggtgttcaagaccagcctggacaacataatgagactccatctctactaaaaataaaaaaaatttgccctgcatggtagcatacctgcagtcccaactgctagagagactaggcagtaggatctcatgagtctgggatgtcaacgctgcagtgagccattattgtgccactgcactcctgcctgggtgacagataaggcttgtcttgaaagaaaaaaaaaaggaaaagaaaaaaaaaagcaagagtaggactctgaacacaaataaaatgctatataataagggagctggccaggcatggtggctcacacctgtaatcccaacactttgggaggccagggaggctggatcacttgaggtcaggagttcaaggccagcctggccaacacggtgaaaccctgtctccatcaaaaatataaaatattagccaggtgtggtggcgtgcacccataatcccagctactaaggaggctgaggcagaagaatcatttgaacctgggaggcagaggttgcagtgaacagagatcatgccactgcactacagcctgggtaacaaagcgagactctgtctcaaaaaaaaaaaaaaaaaaaaaaaacaagaagaagaaagcaagctaagaataataatgaacttatgtgctttattataaaggcttgtgaccagcttgtgacaggctgatgttatcctcttgtgtaactattgagttcagcaggaatttagggatatactattacctattagtataagaaacctattatctattaatataagaagcctattcttagactaagaatactttttggtcttgagatatcaggacttcaagactttctgttaagttctgggtcttgtttacttatcattaactcattctctcaaccataaaggtcctgtgaaggagagtgcctagcttcctgggaatggaatccagcaggtttcacttcatttggccttattcaagacggagtcactctggtttggacacctctgatatattttcctcctcccttttataaggggatccttaattctaaggggtacagagggacagaggtccatcttcataaatgtcttcaaggtgaacaggagcaatgatattcctccctaaccactgggatcccttgtatttagattggagaggagttcactcagcaagtgttggcgtggtgaggaccaatcattattgtgactttcaacaaaaggtgaaatctggaaaattagtaagtgttcaatttaaagaagctatttaataggtttaccttgttttcttttcttttctttttttttttttttttttttttttgacggcattttgctcttgttgcacaggctggagtgcaatggcatgatctcggctcactgcaacctccgcctcccaggttcaagcgagtctcctgcctcagcctcttgagtagctgggattacagctgtgtcccactatgccctgctaattttgtatttttagtagagatggagtttcactacgttggccaggctggtcttaaaactcctgacctcaggtgatccgcttgcctcggcttcccaaagtgctgggattactggtgtgagccactgtgcctggctaggtttaccttgttttcttgcacaaaaattacaacagcaatacattccacagcaacaaaacagaatctgttccaagcatctgaacaaaaaggttttccatgaaccagacaattgctggaaccaccctgatatggggtcaactgacagtgtgttaatggcagagatatgggtgtctaagtccttcatggcctgagtaatattatgttaatattatggaatatacaaacaacattccattttgatgatagcacaagatctcccttgagccgctgttaaaatgtccaaagccatgcagtttcgtaaggctacctgtctaatttgagaagtctcttcagttagtaggataatggcatgctgtgtagtattgaaagctgtagctgtatgttggaatacagattcaacttgccacttgacatccattacagccacctctgacagtaatatagccctcgagaaaaaccaccaagtagggtcaggcgcggtggctcacgtccataatcctagcactttgggaggccaaggtgggtggatcatctgaggtcaggcatttgagaccagcccggccaacatggcaaaaccccatctctactaaaaatacaaaaaaattagctgggcgtggtggcaggtgcctgtaatcccagctactctggaggctgaggcaggagaattgcttgaacccagggggcggaggatgcagtgagcggagatcatgccactttactccagcctggatgtaagagcgaaactccgtcctggaaaaaagaaagaaagaaaaaaaaagagacctctttggtcacctgtggcgagatttcccaactttccagttagacgggagagagtctaatttagtgaggatatgtcctgggagataaggatgaccccatgtacatcttccaatccaattacaagataaatacagccagccatgagacccacatgcccatagccagccccaaggagaaagacaagcaaccagtggctaggacttattctgccattccatgcacatttggtcacttacaagggtgtgattacattgttggggtggtaaccttcccatattacaggtctcagtctcttcataactgttactatgtctttcaaagcatagggacactatgcttgatacctgcacttggacagctgtcatccacccaagtccatcatgcacagcataacagggcagggtggaatttagctgtttcttcattaaacaaaaaagacgcttccttgtttcattgtgagaaatgaaagggctggaccctttgtttttatagtacatgggaaaacgtgatggatattcactccaatcataatgatgatcccataaactcatattggctggcaggatgtatcatggcagcaccacggtggaggagagctgtagttctccacacacccggcaatccattttgttgtgtagggaggctgaagtttgtgcccagccagcaaagagattgcctcttagctaataccaatatgtgtccagaattgggatattaatccagatttttatgttatttatctttcttgtttcttctaagcaggagccagatatcactggttggttcacaggaataagtggaatcagtctcttgtgttccagcagcctgtgggacttcataagaaacagacttaattcaagatcaatgagcccagctgcttcttccttgaagtgtaactgcggttgaggcactaaggagtacttacttagtagggtcctttccactgtgggaaagttgatctgctagggaccattttttcaagtcattaacaggatcccatttcctggctggattacaataggatttttttccttagtgagggaaggaagtctctcatttctgtattcaagaagagctttttgcacctgacctaagttggcaacataattctgtaatttgaaagtatctccatctactaggaaatcagcaattctttcagaaaggctttccgtacattatttcaaaagggctgagccttccactggggcagcccaaacttgcagcgaggccacaggcgatagacggagccaggtttctgatgtttcctgtcagagcttagcaagggtcctgtctaaaatttgattggtcctttctacttttcctgaagactgtggcctccatgcggaatgaagaccatattgaattcctagagcggatgctatgtcttggttattgttgctgtaaagatgggccattatcactctacaagcttttaggcaacctgaatctgggaatcatatccttgaatgaaaatttagaaaccttgattgacttttcaggccagataggaaaagcttcaatccaacatgtaaagaaaggtatcaaccaacactgataaatattggaatcctttacatgggggcatttgggtatagtgtgtttgccaatcttcttctgggtacgaccccctatgctgaacaggctttactaatggaggaggtaaagtttggttgtttgaggtttttttgggcacacaattcacaggcccaagtcacttgttttactgttctaagaaagtcttttcggccaggcacggtggctcacgcctgtaatcccagcactttgggaggctgaggtgggtggatcacgaggtcaggagttcaagaccagcctggccaacatggtgaaaccctgtctttactaaaaatacaaaaattagctgggcatggtggcagatgcctgcaatcccagctactcgggaggctgaggcagagaattgcttgaacccaggaggcagaggttgcagtgagctgagatcacaccactgcactccagcctgggtgacagagcgagactccgtctcaaaaaaaaaaagaaagtctttccctataaacagatgagccatattaattgaaatgagaaatctcttcccaaatgagtagagccatgccaatacttaactattttccattgatcagctcttggtacatatcatctgtcattttcatcaattagccatctggaagtgcttatagttaacccatgggtcttagcccatttttgttcttttctagtattaaccatgctctagttttatcgtcaccaaggcagtgggcaccaacatgcctaccagattaactggttccctcaaatgaagctgcctcagctgtagcatctgcaaaagaatgcccttttattattttggagttttctttctttcttttcttttcttttttttctttttttttttttttttgagtcagagccttgctcaagttgcccaggctggagtgcaatggcacgatctcaggctcactgcaacctctgctgcccaggttcaagcaattctcctgccttagcctcccaggtagctgggattacaggcacgagccaccacgcccaactaatttttgtatttttagtagagatggggtttcaccctgttggcaagcctggtctcgaactcctgacctcatgatccgcccgccttagcccctcaaagtgctgggattacaggtgtgagccacagtgcctggcatattttggagttttctttttgatgtcccttgcagtgaatcacagcaacttccttaggcagcaaggaagcatctagtagatttaaaattcccaaataatgttctataggggagcccttagaagttaaagagtccccattatttccaaatagcagcatgagcatgaagcaccagaaagccatacttggagtttgtgtacatgttaattcttttttaaaattattatccttttttgagacagagtctcgctctgtctctagcctggagtgcagtggcatgaccttggcttactgcaagctctgcctcctgggttcaagtgattctcctccctcagcctcctgagtaattgggactacaggtgtgcaccaccacgcccaggtaatttttgtatttttagtacaaatggggtttcaccatgttggccaggctgttctggaactcctgacctcaagtaatccgcctgcctcagcctcccaaagtactgggattacaggtgtgagccaccacacccagccctagtggcccgtcttttaaatcctgccagctggaataaatttgttccatagcttgtgtacatgaatgatctagggtgcctttggatccaagtagatacgtagctaggattaaggtcttctgttatactttaagagttatatcaagagtatctagcaataaagcctgataatttaataactatcccctactcatctattggtgccctttagcttctagggcctctgttatttggtgtggggtcaaaacctccagatgttgtcccaaagttaatttattgtcttcatctatgagaagagcagttgttgcaactgccctgaaacatctgagtcatcctgaagccacatggtcaattggttagaaaaatatgccatgggtcaagggatgtatccctgtttctagacaagaacatttagggctgtcccttgtttctcagccacataaaggaagaaagtaaagcctgtccctaaacccacggggaagaattgtccaagttaacacagaaaccaaaagattattaggtaatcaaaagtaaagaccacaataggggactcagc

SEQ ID NO: 399 - DNA, 1211 bp, Homo sapiens
ggtgcacagcccaggagtgttgagcaatttcggtttcctctgaggttgaaggacccaggcgtgtcagccctgctccagacaccttgggcatggaggagagtgtcgtacggccctcagtgtttgtggtggatggacagaccgacatcccattcacgaggctgggacgaagccaccggagacagtcgtgcagtgtggcccgggtgggtctgggtctcttgctgttgctgatgggggccgggctggccgtccaaggctggttcctcctgcagctgcactggcgtctaggagagatggtcacccgcctgcctgacggacctgcaggctcctgggagcagctgatacaagagcgaaggtctcacgaggtcaacccagcagcgcatctcacaggggccaactccagcttgaccggcagcggggggccgctgttatgggagactcagctgggcgtggccttcctgaggggcctcagctaccacgatggggcccttgtggtcaccaaagctggctactactacatctactccaaggtgcagctgggcggtgtgggctgcccgctgggcctggccagcaccatcacccacggcctctacaagcgcacaccccgctaccccgaggagctgtagctgttggtcagccagcagtcaccctgcggacgggccaccagcagctcccgggtctggtgggacagcagcttcctgggtggtgtggtacacctggaggctggggaggaggtggtcgtccgtgtgctggatgaacgcctggttcgactgcgtgatggtacccggtcttacttcggggctttcatggtgtgaaggaaggagcgtggtgcattggacatgggtctgacacgtggagaactcagagggtgcctcaggggaaagaaaactcacgaagcagaggctgggcgtggtggctctcgcctgtaatcccagcactttgggaggccaaggcaggcggatcacctgaggtcaggagttcgagaccagcctggctaacatggcaaaaccccatctctactaaaaatacaaaaattagccggacgtggtggtgcctgcctgtaatccagctactcaggaggctgaggcaggataattttgcttaaacccgggaggcggaggttgcagtgagccgagatcacaccactgcactccaacctgggaaacgcagtgagactgtgcctcaaaaaaaaagaaagaaaaaaaaaaaaaaaa

SEQ ID NO: 400 - DNA, 1619 bp, Homo sapiens
gtcatggaatacgcctctgacgcttcactggaccccgaagccccgtggcctcccgcgccccgcgctcgcgcctgccgcgtactgccttgggccctggtcgcggggctgctgctgctgctgctgctcgctgccgcctgcgccgtcttcctcgcctgcccctgggccgtgtccggggctcgcgcctcgcccggctccgcggccagcccgagactccgcgagggtcccgagctttcgcccgacgatcccgccggcctcttggacctgcggcagggcatgtttgcgcagctggtggcccaaaatgttctgctgatcgatgggcccctgagctggtacagtgacccaggcctggcaggcgtgtccctgacggggggcctgagctacaaagaggacacgaaggagctggtggtggccaaggctggagtctactatgtcttctttcaactagagctgcggcgcgtggtggccggcgagggctcaggctccgtttcacttgcgctgcacctgcagccactgcgctctgctgctggggccgccgccctggctttgaccgtggacctgccacccgcctcctccgaggctcggaactcggccttcggtttccagggccgcttgctgcacctgagtgccggccagcgcctgggcgtccatcttcacactgaggccagggcacgccatgcctggcagcttacccagggcgccacagtcttgggactcttccgggtgacccccgaaatcccagccggactcccttcaccgaggtcggaataacgcccagcctgggtgcagcccacctggacagagtccgaatcctactccatccttcatggagacccctggtgctgggtccctgctgctttctctacctcaaggggcttggcaggggtccctgctgctgacctccccttgaggaccctcctcacccactccttccccaagttggaccttgatatttattctgagcctgagctcagataatatattatatatattatatatatatatatatttctatttaaagaggatcctgagtttgtgaatggacttttttagaggagttgttttggggggggggtcttcgacattgccgaggctggtcttgaactcctggacttagacgatcctcctgcctcagcctcccaagcaactgggattcatcctttctattaattcattgtacttatttgcctatttgtgtgtattgagcatctgtaatgtgccagcattgtgcccaggctagggggctatagaaacatctagaaatagactgaaagaaaatctgagttatggtaatacgtgaggaatttaaagactcatccccagcctccacctcctgtgtgatacttgggggctagcttttttctttctttcttttttttgagatggtcttgttctgtcaaccaggctagaatgcagcggtgcaatcatgagtcaatgcagcctccagcctcgacctcccgaggctcaggtgatcctcccatctcagcctctcgagtagctgggaccacagttgtgtgccaccacacttggctaactttttaatttttttgcggagacggtattgctatgttgccaaggttgtttacatgccagtacaatttataataaacactcatttttcc

SEQ ID NO: 401 - DNA, 5844 bp, Homo sapiens
gtctttgtggcccaaactgttctagaaaatgggacatatattaaagatgatacaatttttattaaagtcatagtggatacttcggatctgcccgatccctgataagtagctggggaggtggatttagcagaaggcaactcctctgggggatttgaaccggtctgtcttcactgaggtcctcgcgctcagaaaaggaccttgtgagacggaggaagcggcagaaggcggacgcgtgccggcgggaggagccacgcgtgagcacacctgacacgttttataatagactagccacacttcactctgaagaattatttatccttcaacaagataaatattgctgtcagagaaggttttcattttcatttttaaagatctagttaattaaggtggaaaacatatatgctaaacaaaagaaacatgatttttcttccttaaacttgaacaccaaaaaaacacacacacacacacacgtggggatagctggacatgtcagcatgttaagtaaaaggagaatttatgaaatagtaatgcaattctgatatcttctttctaaaattcaagagtgcaattttgtttcaaatacagtatattgtctatttttaaggcctcatctggtctctgttttaataatttgtttgtcagaagaccctgaagtatatacctaggtcttttttttgaaagtctctaaattcagaatcattttttaatttaaagttctacaaataattgttactgcaaacattttattttaaaacgttgatagactgatatttcttggaagaaaatataaaatatcaaacactggttatcacttgtgataggaaagagaatattcaacctgttgttatttctcgttagaaatgtaaaccttcaaatatctgtcgtagttaatgacacgacttcacaattctgaacggagcctcgctcatggatgctgtgcatcattttcagatttataattgttttcaccctaaaatagggcatccgttgaactttggagttctaaacaaaatcctgtaggtgtttggattctgccccatgtgttcggacgagctctctgttgctgacagcaccggccttcggtctccatgtcaggggtgggcgggtgactgctgagggaggcccgcaggtgtgtttctccatcccgtcatcttgctgcatgccgtcaacggtctccgaaagcaacgttgtgcgtagagctggtggcatacggcccacgtgccttagatgggacatgctgcttctccaccctgggtttgcattgagcatcattctagaaagtgctagtttaaccagacttttctctccaccactagatctttgtctctacaagggccctcagacacctctgcacctgctgaggggaagccaggctccaccgtcggcttctggagcctccgctgcttaattaccacagattccaaatctctaggccccacgagtgagccgcctggtccaagtacggcctggtcccaccctgagggaggcaggtgtggaacagaagccgagcctctccgtgtccccaccggggccgtgggcacccccacagcccgaagcagaaccctctgagcattccagagaccgctgctcgggggcctgcccaggctgaccaacgggcgctcctgaccaccaccctggcgggaagggtggccacggggcccgtcgtcccagcctgtgcctgcccagatggcattttctcaactcactgtttactgtctctcagtgtccaactgtgattagaagcctggagcctgccccctgcaccccttttgctatgcaccacgcttcatggtgctcttaccactgatgggtgctacacgcgacgggtgcttcttaggcaaaaccaatgtatgcgaactgtcacacctgtgccactcgcccacaagccgcgcccacaattggccagctgggccgtgcacgtcagactgcctgcctcggctctccccgtggccgcgcggggacagcttggtgggtgcccggtggcccacctgtctctggtgctgccatctgtcctgggtgtgccttcgccccagtgcctgctggaagtgccctccgtcgcacccctgtgccctgagctcccgtgaggggcccgccgcgccctttcgcggtcgaagcgttccgttgttcttatctgcctttcctttccccgctctcctgggattactttgggggaatgagtatccttggttctgccctgtgagggagtcgtgtgtccctgctcataaaggaaggacttcctgcagaagctgcggaaaactactgttccctcgaaggtgtcccccacctgaggcctgtcccctacctgccctcaggtagttttcctgaggccaggggttaacaacagggacatccctgcaacttccccttcacaaaatgtataatattagatgaaggatatgcaacatcttggtctagtaagaaccgtttcctcccctctgggttgaagtcctggtgtggcccccagaagcagcagtgcgtgtcactgggacgtctccagtagcccttcccaggcagacgctcctggcgggacgccatggggcccacctgagggtcccacagacgtaacctgagtgacaggagtccttgaggatgggatggcctatgtcacacactttgtccttgaacctgagtgatgggggtcattgaggatgggatggcctgtgtcacgcgctttgtctttgtgtttggttgtatcggggtctctgttctgagtgtgtcttcctctcatgtactcaacacagtgggcagcagcctgggacggcgtcccctctcccggcggcgggcaagccttgcgctgctccaccctcggcctgggcaccctcacttggcgctggccacctgggccagcctggggccatggtctctctgcagctgaggcccagtggccccttgggcagtgatcggccctccccgcatcacagggccctggcagcaagcgggaaatgggggcgcacactgtgtgcttgggggtgctgcttgtttaccacacatgaccagactcccagcaggacagagctgctcagtactttacagaaaccaactgagtcgtttgtgcatgaattaagccggtctgcttccccgtcaccttcgtaacaaaacaacgtcccctctcccctcgcctcgagcagtttcttcaggacaccgtggctcgggctgctccctgctgccaggcacgctggttggctggcctgggcccggctcacgtgaagggcactggctcttgtgaccacactgagccacgtgcaagccgcagccgggcctggaagcctgaccctctggttctagggcttgtcccgcggagcctgcagagctagacgttggggtgtgtccgtgatgatatgggggccaggctgggagtagggcctttctagcagggttgggtggctcagtgagggtgtggaagtgggggacccacggggcctggctttgggactagacatgccagccccagctgggctggagggagcctgagtgagccccgacatacgctgggcctttcagctcgccgtgctctggtgacacacaggcggccaggttgggatttgtgtcaattctaggagccatcaagcatgaaagtggttctgtctcctgagcgcaagcctcgccggacccctgggcgaaggcctggacttgcagatgtgtgttccctgtgcgggtggacagagggggcccttatgacccacattgcagccccattccaccaccccttcctccccagagcagtctctgccgagggacagcacctgtgtcccttcgatgccacaacagccagttgaacaggggagccctttgctcaggcagcttctcctgcctctccctcctttctccttccctgccccatccccgtgcccttcttggcctgtggcgctggggagccatggtgtggcatactggggctcctgctccttgggccacttcctcagcccgggccccacaggcccaccacctgccagggctcccactgcactggctgtggcaggaggcttccccatgaccccgtgtggcccagctcggtgaggatgcagttctaggcacagcccctgggacagccagctgcctcccagaccacgtcagcctgctccagggtcctcagtcaccctgggccaggggccacgtgtcccatggatgtcgaccatgccaacgtcacattccagcaccccttttgcttgatggcgtctggtggtagtcagcatggtggacccacatcctacagccagaggtgatgttggacaaaggaaggggagtctggatgggtccttaaacgaccattctgtccgcagcggggtcattccttgtcagcccaagggagggccggggagtacactgatcccaacagctgggctgacacctcctttctcccctgcacggggaggattggcctgaggaccgtcaccctgtgcacagccccagtagggtggcagtgccactgtctccttgggccgttgcaggattgggcgggtgcagactccccttgcgggccccttgctcaatccccggccctcccagactcctccctctactgggggtaatttgtgtgtcagaagggctctggcagagctgtaaaatactgttttttaaaaattttagtccagatctttacttattagactgcagaaggagagctagggagagtgggggaagcccccttgcttttgtatctgtgaggtgaatgagggtctgtcacccaaatctacttctcagcccatgaccatagttctgttttccgtttgcaaatctcagtagctctgttttctccaaagtagaatgtgcgcaccggggtcctagccaggcgaggtcagtgtcggcaggctacctggtcattattgctgcctcgtccaggctgatgctgatggtcacaggcacggtggcatcagggagccgggccagcaggcggcgtgaggcggggccagcagctcactgcaagggcattttccacctgatcctggtgtgccccacatgcggtggcagggcagacgtgtgaagcctcggccgtctcggggctggcaggtgtgcgggtgaggaggccccggtggccaagcagagcctgcgtttcatttctcctgctgcactgtgtctagtctgtcttgtgaactctcaccgtgaaaagaggctagaagtccaggatcgctgtaccgctcctgtaattaggtgatgactggatttgacaacttagtcccctcagacaagtaagataccctccaacagcaaattcaatgacttaattggaaaacacacaagctggcatgatgtccggtgatttctgtaagaaatgcctgtaggagaaggtctgtgaagtgtggagggcagtgtcgacgctgcacagcatctgcagattcgcagcctcttctctgccggtgcctctgttcggttctgttacccaaaaacaaagaccaaagaaggccaatctctcatttgaccctgtctttttaatctgcctgttttaaaagttgcgtctgtagtagccgcttgctgtgaagacacatcttgacagtccaagtgattttgtgaccagtgatttgggtcctgttttccgctcttctaagaaaaaacaaaaagaccgtgagttattgcccagcaataatcatgttgttactgtgagttagcaacatgcctgacttcctgatagcattactgttttctagttttgtttattgtatattatgtgtggttttatttggtatttatttgtgttttgaggtcttgcaatgtttttgtgtttctgatgctaataactaaagtttgtaagactgtagaatgcaaaactcggagatgctaaactgtcttattagaggaaaataaatctgattatggagtctcaaaaaaaaaaaaaaaaaaaaaaaaaaa

SEQ ID NO: 402 - DNA, 5504 bp, Homo sapiens
aagctttttgtggcaacctgtatgaacgcggagggagaagtgccctagaccagcctccagatcgttcctactggggctgtcagcggctttagctcactgggcgctagatgggagtgtcccctccgtacccggacgaaggcggggcgcccgctggcaaagcgcattttccagcgcaagctgtttggggtgcggggctggcgagtgagggaaaacagagggtggcgcgcccaccatcagcgtctgtgcagccccacctgcgccgcgggttggtctcagccggatcctgcagccctcatcgagcaaaggctgggcgcggcgcccccactgccggggagggaagaggctgggaggacgcaacaggcccaggctgtgccgggcggggagcctgggcaggcagctgcacccccagccccagagggctggggaaggccggcccgaccagcagcaggaaagggggcgctaagtcgccttcaagcccgcacggctctcccggcctttcctcctgtcctcagagtcagctcccccgcccgggacgtcccgcgccactccgcgcctttggccctggctcaaggtcttgtgatgtgattagacaaagccgacgccttgtcctcagacactcagccctgcccggcaggccccggacgctcaagccctgtttactgagcctgggcggggagggggcggaagaaacgagcccgggctccaccggcaagactgccgcggcggccgcccgcgtggccacccccacccccaccgcgactccacgtgcagtcgggctggagccgccaccgactggacgcaggccccgagcccccgcctcctggccggggcaccctttgcaaacccgccgggccgcggggctggttgcgaatatctggcattttgcaattcccgcgcccagtacaaaaccgaagtggagcttaaagctccacaggtccgccgtcggagaacagggcagggaaagacacgtccagggctgcagaatcccggccacgctaaacgaccgggctctccgaccgcgcaccccggaggagaacagccgtgccttcccgccgccacccggcgcatccactggggccgagactacacgccacaccggccgcccgaccgcgggccccgcccggaggcctggagcaccctcccccggaggtaaaaaaattgcgcggccaatgggaggccgggaaggcgcctgacgtccgcgagcgggcgggcggcgttgcctggagaccccggcgggggccgagttctgtcccctcccccggcgcgcccgccccgccgcagccgcactcccgggctctatttagggcgcgcgctcggcggaggccgccgagttccagcagtccgcgagctgccgtcggctccgcggggggggcgggccgggcaccccggggcgcggaggagcgctcctcgcttctctccttcccccctgccgcactccgccggaccctcccgccggcccgcgccgctgcactcgccctctcctctcgccccccggcaaactttcggcccctccccgcccctcgcccgttattcgtcgtggctcaagcccggccacgccgccccaagggctcctcccgacctcccggcctgccgctccggccactgcgggatccagaaacatgtcgaccacacttctgtccgccttctacgatgtcgacttcttgtgcaaggtaggccagggacggggcccggccggcagcagccgttgtagttcttggactttgcctctgtccccaggttctgggggacgcccctcccgccctgcctttcaaagcgggaaagtcccggggtttgcaaaagagtgtccgacccctgagcgggaggacgccgtgtcgcggttgagtttctccactgccgaccgcggccacgctgcccggggcttcccggacagcttcgcgccgcccacctcggcagccggggcggaggatcacgtgtcgaaacccagcgcggcccacggtgggcgtcctcccctctcccgctccgtccagcaagatcttgctggttttgcgcgtgtataggtggagggtggaggcgagtcgggatccgccaagagtgggggaaaaaaaggaaaagaatcagctgggagttcctctgcggctcgccccgagtctgtcttccccttccgtttttcatcccttccccgctcccctccctttggcagacagagaaatccctggccaacctcaacctgaacaacatgctggacaagaaggcggtggggacgcctgtggccgccgcccccagctcgggcttcgcgccgggattcctccgacggcactcggccagcaacctgcatgcactcgcccaccccgcgcccagccccggcagctgctcgcccaagttcccgggcgccgctaacggcagcagctgcggcagcgcggcggccggcggtccggacctctacggcacccttaaggagccgtcggggggcggcggcacagccctgctcaacaaggagaacaaattccgggaccgctcgtttagcgagaacggcgatcgcagccagcacctcctgcacctgcagcagcagcagaaggggggcggcggctcccagatcaactccacgcgctacaagaccgagctgtgccggcccttcgaggagagcggcacgtgcaagtacggcgaaaagtgccagttcgcgcatggcttccacgagctgcgcagcctgactcgccatccgaagtacaagaccgagctgtgccgcacctttcataccatcggcttctgcccctatgggccgcgctgccacttcatccacaacgcggacgagcggcggcccgcgccgtcggggggcgcctccggggaccttcgtgcctttggcacgcgcgatgcgttgcacctgggcttcccgcgggagccgcggcccaagttgcaccacagcctcagcttctcgggcttcccgtcgggccaccatcagcccccgggcggcctcgagtcgccgctgctgctcgacagccccacgtcgcgcacgccgccgccgccctcctgctcttcggcctcgtcctgctcctcctccgcctcctcctgttcctcggcctccgcggcctccacgccctcgggcgccccgacatgctgcgcctccgcggccgctgcggccgctctgctgtacggcaccgggggcgccgaggacctgctggcgccgggggccccgtgcgcggcctgctcgtcggcctcgtgcgccaacaacgccttcgccttcggtccggagctcagcagcctcatcacgccgctcgccatccagacccacaactttgccgccgtggccgccgccgcctactaccgcagtcagcagcagcagcagcagcagggcctggcgccccccgcgcagccgccggcgccgcccagcgcgaccctccccgccggggccgccgcacctccctcgccgcccttcagcttccagctgccgcgccgcctgtccgactcgcccgtgttcgacgcgccccccagccccccggactcgctgtcggaccgcgacagctacctaagcggctccctgagctccggcagcctcagcggctctgagtctcccagcctcgaccctggccgccgcctgccaatcttcagccgcctctccatctccgacgactgaggcaagagggcgccagtgaggaggaagggaaggcggttcagagatgttggaggacacccctcgccatctcgcccttgctgggggcacgggagtggggggggtgacatgggccctaggcagtctgcaagccctaccgagcacttggactcgaactctgtgccgggaggggcccccacccctcctttttcggtttcctcttgtctttttttttttatttttattacgaagtttcattctttttgagcaaaaaagtcgaactttttctgttgaataaaatattcacaacagggcagttgtgatacgaatagaacaaaaaaaaaaaaaaaaacacttaaactttgttaggactccgatgagtttgggacttcaggaaaaatcaacccagcaccagcagctaccaaccaccattccatctcttcacttgaacagcattagttaagtccagatgtgggaacccttctcttggaagaagttcctaattgtgtctcagaccggtgtaaacaaaccagccagccgccaccttgctaaacctataagctttttaaaatccaatatattctgccaagaatatgccttgatagttagccctcagcccataggtgttttttgttttttaacagaattatatatgtctgggggtgaaaaaacccttgcattccaaagctccatactggttacttggtttcattgccaccacttagtggatgttcagtttagaaccattttgtctgctccctctggaagccttgcgcagagcttactttgtaattgttggagaataactgctgaatttttagctgttttgagtgattcgcaccactgcaccacaactcaatatgaaaactatttaacttatttattatcttgtgaaaaatatacaatgaaaattttgttcatactgtatttatcaagtatgatgaaaagcaatagatatatattcttttattatgttaaattatgattgccattattaatcggcaaaatgtggagtgtatgttcttttcacagtaatatatgccttttgtaacttcacttggttattttattgtaaatgagtacaaaattcttaatttaagagattgtatgtaatatttatttcattaatttctttccttgtttacgtaaattttgaaagattgcatgatttcttgacagaaatcgatcttgatgctgtggaagtagtttgaggaacatcctatgagttttcttagaatgtataaaggttgtagcccatccaacttcaatgaaaaaaatgaccacatactttgcaatcaggctgaaatgtggcatgcttttctaattccaactttataaactagcaaaaaagtgtttgcttattccaccagttctactgtgacatactcgagtataaagacatgtagccataacggggagtggggggggagtctccatgcctttgaagggcccgactgccttaaatcttcctcaaccaaatacgtattttattagtgattgagagaatctgaatgtaggatgggttcaactgcacaaaaggaaaagatttttaccactttttttatatagatataaagtgaagcaacccgccttagtgctgaaatatgtagtacatgaatatgccttgtttaattacagaaaattccaaaacttgtactatttttttttccatgtagaaaggcaggaatgtctcctaagctttcctggcagcagatgaatcagcggtagctttagtttgtcgtaggtacagttggagcactatatgtactctctggactactttggacagaagtaggtttttgaatgtaacaagataagtcaacttgagttgtaatatattttgggaaatcagctcactacaaattgtagactgtaaacattgtactgtaaatgttttgtagttttcccccaataaaatttttgggaaaaaagggaattc

SEQ ID NO: 403 - DNA, 1730 bp, Homo sapiens
gggggcgggacgcgccgaggagtggggcgcgagccgccggttttgattagtgcgcggagctgcggcggtggagctgctcggccgggagcccggcggcgagacggagaggcggcggaggtgcccgcgcgcagggtctggtgggcggccgcgaggctcgggagaggcgaaccggagcgcgggcccgcggtcgccccgaccagagccgggagaccgcagcacccgcagccgcccgcgagcgcgccgaagacagcgcgcaggcgagagcgcgcgggcgggggcgcgcaggccctgcccgccccttccgtccccaccccccctccgccctttcctctccccgccttcctctcgcctcccgcgcccccgcaccgggcgcccaccctgtcctcctcctgcgggagcgttgtccgtgttggcggccgcagcgggccgggccggtccggcgggccgggggatggcgctgctggacctggccttggagggaatggccgtcttcgggttcgtcctcttcttggtgctgtggctgatgcatttcatggctatcatctacacccgattacacctcaacaagaaggcaactgacaaacagccttatagcaagctcccaggtgtctctcttctgaaaccactgaaaggggtagatcctaacttaatcaacaacctggaaacattctttgaattggattatcccaaatatgaagtgctcctttgtgtacaagatcatgatgatccagccattgatgtatgtaagaagcttcttggaaaatatccaaatgttgatgctagattgtttataggtggcaaaaaagttggcattaatcctaaaattaataatttaatgccaggatatgaagttgcaaagtatgatcttatatggatttgtgatagtggaataagagtaattccagatacacttactgacatggtgaatcaaatgacagaaaaagtaggcttggttcacgggctgccttacgtagcagacagacagggctttgctgccaccttagagcaggtatattttggaacttcacatccaagatactatatctctgccaatgtaactggtttcaaatgtgtgacaggaatgtcttgtttaatgagaaaagatgtgttggatcaagcaggaggacttatagcttttgctcagtacattgccgaagattactttatggccaaagcgatagctgaccgaggttggaggtttgcaatgtccactcaagttgcaatgcaaaactctggctcatattcaatttctcagtttcaatccagaatgatcaggtggaccaaactacgaattaacatgcttcctgctacaataatttgtgagccaatttcagaatgctttgttgccagtttaattattggatgggcagcccaccatgtgttcagatgggatattatggtatttttcatgtgtcattgcctggcatggtttatatttgactacattcaactcaggggtgtccagggtggcacactgtgtttttcaaaacttgattatgcagtcgcctggttcatccgcgaatccatgacaatatacatttttttgtctgcattatgggacccaactataagctggagaactggtcgctacagattacgctgtgggggtacagcagaggaaatcctagatgtataactacagctttgtgactgtatataaaggaaaaaagagaagtattataaattatgtttatataaatgcttttaaaaatctaaaaaaaaaaaaaaaa

SEQ ID NO: 404 - DNA, 31737 bp, Homo sapiens
gaattcactaaatagcatgcaaaacaattactgaatgtttctaagttgttcagcattcaggtataatggcttttaagataatataaaaaccaatgcttttaaacaataaccttgtgatagggattttgaagttcaacaaatattaaaattacagaaagaaacatctttatgagtcaattaaagtatgtaaaaattatttacaaagataactaatgaacaaaaataatccatctctcttaataaatgttagatatgagcttcggcttatttgtagataatggaatatggaccatctattgtatttttgaaaaggcatacaacctgagtaaaataggtttagctatgaaagtgttatgaaaatagctaataaaataacaagccaaaaaaaatcaaaagtgttaatggccagaagccttaaatgggcatgtaacaataaacttgagatcagcctttggctcagctacatgggaatacaactggaaaaggcagctggagctctcatccttcactcaggtgtgcttgtcacttccatttctaactttcatcctctccatgcttctccttttaatcctccactccttctttacacctttcagttcagtgtaatccacttacatttagggtgcacatttcttatccctgtggatacaaaatgggctcttctgaaacataaaacttgttcctaagacttccatatcccattattttgaattttctcagcatgagaatagtgctttattcataaaagatgttaaatgaaatgttaattgttataaatgcttggacaaattcttatggagaaagaattaggtgagtggtatggtttggatctgtgtcatcatccaaatctcatgtggaaatgtaatccccaatgttggaggtggagcctggtgggaggtaattgaatcatggggctggtttctcatggcttaacatcatcccccttgatgctgtcgtggacatagtaatttctcataagatctggttgtttaaaagtgtgtggcacctccccactctctcttgctcctgctccaaggctctctctcccgactctctctcttgctcttgttccaggcatgtaagacgtgcctactttcccttcgtcttttgccatgattgtttcctgaggcctccccagaagcagaagcactatgcttcttgtatagcctgcagaaccatgaggcaattaaacctcttttctttataaattacccagtctcagttatttctatatagcagtgtgagaagaaatgggttttcagattgcatctgaatgggaacataataatttaaataataaatttaatttataattaataataacatgtaattaattataaattaatttataattaataataacatgtaattaattataaattaatttataattattaataacatgtaattaattatgaattaataattaataataacatgtaattaattataaatttataattaataataacatgtaattaattataaattaatttataattaataaatttaattaataaaattgtttaataaattaaaccaaatgacaaaatagcacatgcagaatgaatgcaagcatctggaaaaataagcatcattttaagaccaatgaaatattttcaacatttcaatagcaagcatacttttgctaacataagaaaaaaaaacaaaaagtaaaaaataaaaatacacaaaacatagtctgtaaatgccatctagtagttttgactgagtacaaatatacatattcctccaagtttcctaactgttcagcaggatgttagggactacctgagtcagaattccaggggttcaggtagagaggtgttttcagtctatgggagggtgctgcaattttctttgtgaacacctgcaagactctgcatggtccagtcctgcttgcctcacatcttcattgcttcgcccttcccttccctcttggggctccagccattctgcacatctgttttctctatgactgcaccatacccttttccgtgtcctaaatcttgtgccatctcctccctttgtctgaaatatttccctccctatctttgcctaactactggcttttcaagtctcagttcaatgccacttcctttggaggtctttgctggcctctctaataagatttagactaaaagctctctgaagtccctggtgcttaacatggtgttgtaaaaccttatgattatttagaatccagatatgcattccttaggccttgatgtttactgggggccttgggtgtttcttaatttgttcaattatttacaaaaggttttttttggggtgggaggtataggctgtgggctatgtactaggaagacaatgataaataatacatggcctttcctttcagggtaattccagtgcagtaagagcgacaattattaatctaagtataataagtattttaggatggtggtggaagtggggacacaaaggagacagcggtcaactctacttggagaggtagaaagacctcatggaggtgtctttgaatttatcttgaaagaagtctaggattttaccaggcaggctgtgtggtaccagcaatgccttggaatttgagacatcattgcacgttacaaaaactgcaagttatctatgtggctgcagcacaaggtgtgagaaggagaggaatacagaaatgggtgaacagcaaatgagaggttgaagaggtggtgaggcaccaaatgctgtgggccatgttctagaatttggactttatctttaaggcagtggaaagagaatgaatggtttgaagcagttttttatttagggaaaatcactgtcagtagtatggaggataacttaggggaaaaaaaaacatgccagagctttgcagtagagggtcccatcttgtgttcaagagtggccaagataagcagtccctttgcaaacaagccacttctgctcacagaaggtccttatcacttcttaacattcctttggtggagaagccctatagcctgaggctttaaagggggcagaaaattacagcagattgtcaaaagaatatggcaaagaaccaataatgggagctaacatctcttaaaattggcactttaattattttaattttaaatgaagtcagaggaggtgaaaagtattttaaatttttaagcaaagtatatgtaactgttttataaaaatgaaaacatgcttagggagagagagcttatttagataagttttgagctttatcaaaacaattttaacactctagcaaataggtagacttctttcttcttcaacagtttctttcttcttcaacagctactgctcacagtaaaagagcacttggtggaaattttgttctgaagtgaaggctgaaaccccagagatcaaacactgtactcaagtatacaaagctggactcagaccctaacactggctttaaaatttgtcctaacttagaccataatgcctctctttccagctggatctacatgcctccactctggcttttaacaaggctctgaactattgtcagaacttgggaatttctaacattgaaggtaacacattgacacaatttcctcgatgtaaaattgtatacactttatccaagtcccatctgagcatgttatgtcctatttgtacccttacaaaaactgattggtggccaaattgatttgagactgaaagttgccacttatgttcttagaaatacttgctttaattcaccagaatcagttgctctgatacaacttcttatagtcacctaagtcaacatagtaagaaaataaacatataaattccctaaagataatttgataaaaattgttttttatatcatttcctcaacaatctcataatggtagctgacctataaaatgacctttttcatagttcatttttcttccatttctggaaaaaagatagcataagtctttcagtaggaattaatacccatgcatgcttagtggtaagaagaaggcacagaggcttgttactggaagtctatagtttacaaaacagtgtcatcttgaaggaacaatagctcccataaaaatgagttttcatattttcttgtattaattaacttttaaataatttcgtagttattccagagtagaatcacatgggggcaatttaaagaatttcatcaataccttcaaattaaataaaccagcatctggttgaaaaaaaaaaatcacttacctggaaggagaaaccaaagaaacatcctcaaattctaaagcttcattcaaaattcaaggtaaggaaaccaaatttccacaatatgatcccttaaaatcaccaagaatgttcaaaactacatttgataacaacagctcacacaactacttggctctcctagattcctaagaccctaaccagctaatagacgtctgtggacatattcaattctgcaaagctgcaaaatatctgtgagaagatggtttttgaataggactttttactatagctatatactatttagttcagtaaactgggtagaaagcattgaagcaaactcgtaaccattgaacaacaaactttagtttgccaaaactgcttagggactggattaagggaaggctctcctgttatttttatctctttgcctttggtgctctcagctttctgtagctaaagtagctttcaaaaatctacttgtgtcattcctagattaaaggtcagtttaagtattgtcctgttgaattcagaaggtacatttaagctagaaaaccacttgcagcacatctaatccaaattgccgactttacagatagacatttggtctcataaaaattaaatgactagctcagatcagcatatctggtaagcagcagaactgagacttaattctgctggccctcaatattagtctcaccttccggatctcgctgactggttgagatcttgtcagcaagatttctctaatgttttagtacattagtcagcaagcattggggcatattgtacatacaaaaaaggacagctaaattcctgagctccctggacatcctaaaagctagaattttagtaaaaaccatgtagtcttcattttgatgatttttccacactaatttattgtattacttagattatatctcttacccctcagtgtccttatactatagccactatgagaaattatgttttgctctagcaatacggagatgagagtcagtttcttaatcccttcacatcttctggcaggaacacatccagtctatacctgcaaaatttcacctctctctacaagtgaagtatatttaccttgtggtgttatgaaagatgtgtccagcatctggctacccaggaatagacagaccttgtgccaacactgcacattttcttagctgcatgggcctctgagaaacatactctgaagaccttaccccatgcctacttgcaaatgaatcactggatgaaccctgaaggatgggcagagttttaggtgaagatgcagaggaggagggataaagaaatagcatgggcctaacatatggagaaaggggagtataacatgcattgatgtggaggcttagggcacctagcaggcaagtgttggcaaatctctcagattgataagagtttaatgattaagtggcaaattagtgcaaaataaaatataaaggtatgttttgtcatattagtgaggcctcaaactcctactttaaatttatgtttttcagttttcaggcactgaaatggcatttgctatggtacttagtacaaagtaaatctgtgtgacctgaattgaattctgtaatttaggtttgagaagggtggaatgaattggtatactttctagaaaatgaaatattcaatatttgcgtttggatcatctcacagcttatacttgtataacatcggatatgttccagaacatttcacctctcttgtctcttatccccatgtgttgggggagagagcgtggacttctgccacagttcccattgtaccatggaggtggggtgacttgggggcccaagacatgttaggataacgactggaaatagccagcctcctagctctctgctgcatgctttatctaccagaccactcagctttcccaaataattgacatttctaacctggaatgctattagaaacaataaaaataaagtgtgatattgtataagtacgcttcagtttcgctgtatgccaaaacttccagtggctgagctcttgtcaagatgtgataaagtcagctcatgcagctgctgctttgagttttggttcgctcctgacttgcagctgaaagaagccttatcttgcataagcaaactcttacaaggacacacccttcatatgaaatgccttaaatagtttccaagtctgaaaactaaattttctaaatgctacagttttttggcattgcaatgaccatgaaaactacttgataaatgcatctgtggaagttatgctcagctaatttgtggtaaaactgggacaaaaactcatatccattgacttccaactcaatgccttttctgcccaatctcattgtcttggacagaattaacgtataaatgggaatcttgcctgtgctaaaagatgtttgaagaagactgttcccatgaagcaatattttaagggaacgattttgtttggctcttgaaccaaaggattggcacgttcaatcttggtcaagttgtgataatatagttagatacccatactgtctgtggccattcatttttcttttttggaaggtttttattaagccaaagcagccaactacaatttagaaaaattgaacttaaggataaagtgctttgtgtgatagcatctgagcctactgttttggatagcctattctcaatactttttatttgaactcttcagccaatggctctggagaaaagcgtggcctattaactggtgcagttagtgtgctaggtgccaaatggaatgagccagtttctgctcatcttcagaatggcgtgctttggcagtccccatacaactaattggtaacacttcttcctttcctaacttggtagagaagggtgctgtatttattctatctcgaaggtgttgtggcctaggaggactgcagcttcccttcaggaagcctgaactttttagcctcgctctgtactatccagcttctggtcatccacactgtcccaaaccattgctgagacagcagaggtggagaaaaaaattggtcactctgtcattccagccagtgcacattcttcagcctggacagatggaaatcaagatgaatttctgtccactgtcccagtgggaaaggagagcagagttctattcctggctttgccaccaaatggttgggggatctgtgaaagtctctgaaattatctgagcctcagttttctggcctctaagatgagagtagtggaacagatgtctctctttttaaactttaaaaaaagttttgcttttttcttgagatagggtctcaccatattgcccatactagcctcaaactcctaggctcaagcaattctcctgcctcattctactgagcaactgggactataggtgcgcaccgccatgcctggcctggaatggatgtcttctaagatgcttcaccattcatgaatcatggaaatctgtatgtctaagataataatatttgtagttaacacttactgcacacttacttcattccacacatctctctaaccatttttaaaacaactagctgagaccctattgttatatattaattattctttgtggaggaggaaaaaaaaacatcagaaacattgcccgacttgcttaagttcacacagcagccaagtggcagagctggattttgaattcagacctgtgtaactacagaactgtctgccaaggtctactgtgatctatgtagcagaaagagaatgagagaatcaagtaagttgtcattgagagattaaattctcaccaaattataatgcaaccaattctcaagcaagccttcacttcagcaaatcagggctaaatgaagagatataaagatgataattcaccttgtttatagcctgagggtaggagtgttgtacctctaacatagcattgtagggtgacctgcagtggcaaatccacattacggaagaacagatggttctggttattaacagtttgttaacttgaatcttaatttttccagccaagcatattccaatctggtcactcctgcctactaaagaatcctcagaacaaaagaggatttcacatattttacctgtgtccgctttagtctaaggtttggtatttctgtagctgaacttcacacacattaaatttgggcttaaggaagttgggctgaatgaaaataatttcaattgaaaacaaaaactttatcccaaagttctcacaccactggtacttcctttctctggttgaacaatacaaaattgcagaaatgaaactagtttgttctcatccttgactgcatggtagaatcatctgtgatatccaggcattggattctgatgtgcggccagcggcgaaaacaactgctccagttggtaatatagattaatatatgtaaacttcatcttcctgagtttcaaggtccattcttacattgtctatggttctagtgtcacctttatctataaagtgaacagctacagtatgggatattagcctgaacgactttagaaataacatcatttgccatcttaaatgttggtgtttcttagggttttgttttagagccacagtctccctcacttcctccctcaattcgcatttaattttactttaatcactttccaaggataagctcatcagtgtgtgaaacagacagagttgaactgcttggtggaagttggcctgagtgtttggcctgcagcctcacaacctgttcccatctctacctggcagcttcagaaagctccacaggaatttagattggaaatctttagtctaaaacttaagtttttcaaattgtctgttgagagcccttagtacaagtattagtaaacttcttatgtaaagggagagggagtaactactttaggatttgtgggccataactactttaggctttgtggaccatctactacaaatattcaactctgtcactgtgcaaaagcagctacagacaatatgtaaaccaaagcataaataaacgagtatgactatgttccagtaatgatttgtgggcagtagaatttgaatttcgtataatatccacatgttattattattattttgattttttttgtttctttttttttttttttttgagacagaggcttgctctgtcgcccaagctggagtgcagtggcctgatctcggctgactgcaagctccgcctcccgggttcactccattctcctgcctcagcctcccaagtagctgggactacaggtgcccgccaccaagcctgactaattttttgtatttttagtagagatggggtttcactgtgttagccaggacgatcttgatctcctgacctcatgatccacccgcctcagcttcccaaagtgaggggattacaagcttgaaccactgcacctggcctattttgatttttttaagtacttaaaaaagtaaaaatcatttgtaacttgtaaggtatacaaaactagggtgccggccgttcacaggctatagtttgcttggcccctgtattagcataactagaatctttggatgtgaaacccaatcaacagtgctacagagattctctgagaaaattcaaacctgcagtcaagatggtgcattcctctagtaatgggctatgaaatcagtccagtgggttgtcactggcactaaaaatttaagttcctccttgtacctctggtagaattcggctgtgaatccatctggtcctggactctttttggttggtaagctattgattattgccacaatttcagagcctgttattggtccattcagagattcaacttcttcctggtttagtcttgggagagtgtatgtgtcaaggaatctatccatttcttctagattttctagtttatttgcgtagaggtgtttgtagtattgtctgatggtagtttgtatttctgtgggatcggtggtgatatcccctttatcatttttattgcatctatttgattcttctctctttttttctttattagtcttgctagcggtctatcaattttgttgatcttttcaaaaaaccagctcctgggttcattaattttttgaagggttttttgtgtctctatttccttcagttctgctctgattttagttatttcttgccttctgctagcttttgaatgtgtttgctcttgcttttctagttcttttaattgtgatgttagggtgtcaattttggatctttcctgctttctcttgtgggcatttagtgctataaatttccctctacacacagctttgaatgtgtcccagagattctggtatgttgtgtctttgttctcattggtttcaaagaacatctttatttctgccttcatttcgttatgtacccagtagtcattcaggagcaggttgttcagtttccatgtagttgagcggttttgagtgagtctcttaatcctgagttctagtttgattgcactgtggtctgagagacagtttgttataatttctgttcttttacatttgctgaggagagctttacttccaactatgtggtcagttttggaataggtgtggtgtggtgctgaaaaaagtgtatattctgttgatttggggtggagagttctgtagatgtctattaggtccacttggtgcagagctgagttcaattcctgggtatccttgttaactttctgtctcattgatctgtctaatgttgacagtggggtgttaaagtctcccactattattgtgtgggagtctaagtctctttgtaggtcactcaggacttgctttatgaatctgggtgctcctgtattgggtgcatatatatttaggatagttagctcttcttgttgaattgatccctttaccattatgtaatggccttctttgtctcttttgatctttgttggtttaaagtctgttttatcagagactaggatttcaacccctgcctttttttgttttccatttgcttggtagatcttcctccatccttttattttgagcctatgtgtgtctctgcacatgagatgggtttcctgaatacagcacactggtgggtcttgactctttatccaatttgccagtctgtgtcttttaattggagcatttagtccatttacatttaaagttaatattgttatgtgtgaatttgatcctgtcattatgatgttagctggtgattttgctcattagttgatgcagtttcttcctaatctcgatggtccttacattttggcatgattttgcagcggctgttaccggatgtgcctttccatgtttagtgcttccttcaggagctcttttagggcaggcctggtggtgacaaaatctctcagcatttgcttgtctgtaaagtattttatatctccttcacttatgaagcttagtttggctgtatatgaaattctggattgaaaattcttttctttaagaatgttgaatattggcccccgctctcttctggcttgtagagtttctgccgagagatctgctcttagtctcatgggcttccctttgtgggtaacccgacctgtctctctggctgcccttagcattttttccttcatttcaactttggtgaatctgacaattacgtgtcttggagttgcttttctcgaggagtatctttgtggcgttctctgtatttcctgaatctgaatgttggcctgccttgctagactggggaagttctcctggataatatcctgcagagtgttttccaacttgtttccattctccccatcactttcaggtacaccaataagatgcagatttggtcttttcacatatcccatatttcttggaggctttgttcatttctttttattcttttttctctaaacttcccttctcgcttcatttcattcatttcatcttccatcactgataccctttcttccagttgatcacattggctcctgaggcttctgcattattcacgtagttctcgaggcttggctttcaactccatcagctcctttaagcacttctctgtattggttattctagttatacattcgtctaaacttttttcaaagttttcaacttctgtgcctttggtttgaatttcctcctgtagcttggagtagtttgatcgtctgaagccttcttctctcaattcgtcaaagtcattatccgtccagctttgttccgttgctcgagaggaactgtgttcctttggaggaggagaggtgctctgctttttagagtttccagtttttctgctctgttttttccccatctttgtggttttatctacttttggtctttgatgatggtgatgtacagatgggtttttggtgtggatgtcctttctatttgttagttttccttctaacacataggaccctcagctgcaggtctgtcggagtttgctagaggtccactccagaggaactggtaccattccttctgaaactattccaatcaatagaaaaagagggaatcctccctaactcattttatgaggccagcatcatcctggtaccagagccgggcagagacacaaccaaaaaagagaattttagaccaatatccttgatgaacattgatgcaaaaatcctcaataaaatcctggcaaaccgaatccagcagcacatcaaaaagcttatccaccatgatcaagtgggcttcatccctgggatgcaaggctggttcaatatacgcaaatcaataaatgtaatccagcatataaacagaaccaaagacaaaaaccacatgattatctcaatagatgcagaaaaggcctttgacaaaattcaacaactctttcatgctaaaaactctccataaattaggtattgatgggatgtatctcaaaataataacagcaatctatgacaaacccacagccaatatcatactgaatgggcaaaaactggaagcattccctttgaaaactggcacaagacagggatgccctctctcaccactcctattcaacatagtattggaagttctggccagggcaattaggcaggagaacgaaataaagggtattcaattaggaaaagaggaagtcaaattgtccctgttcacagacgacatgattgtatatctagaaaaccccattgtcttggcccaaaatctccttaagctgataagcaacttcagcaaagtctcaggatagaaaatcaaggtacaaaaatcacaagcattcttatacaacaataacagacaaacagagagccaaatcatgagtgaaatcccattcacaattgcttcaaagagaatcaaatacctaggaatccaacttacaagggatgttaaggacctcttcaaggagaactacaaaccactgctcaatgaaataaaagaggatacaaacaaatggaagaacattccatgctcatgggtaggaagaatcaatatcgtgaaaatggccatactgcccaaggaaatttatagattcaatgccatccccatcaagctaccaatgactttcttcacagaatttgaaaaaactactttaaagttcatatggaaccaaaaaagagcccgcattgccaagtcaatcctaagccaaaagaacaaagctggaggcatcacgctacctggcttcaaactatactacaaggctacagtaaccaaaacagcatggtactggtaccaaaacagagatatagatcaatggaacagaacagagccctcagaaataacgccgcacatctacaactctctgatctttgacaaacctgagaaaaacaagcaatggggaaaggattccctatttaataaatggtgctgggaaaactggctagccatatgtagaaagctgaaactggatcccttccttacactttatacaaaaattaattcaagatggattaaagacttaaacgttagacctaaaaccataaaaaccctagaagaaaacctaggcattaccattcaggacataggaatgggcaaggacttcatgtctaaaacaccaaaagcaatggcaacagaagccaaaattgacaaatgggatctaattaaactaaagagcttctgcacagcaaaagaaactaccatcagagtgaacaggcaacctacagaatgggagaacatttttgcaacctactcatctgacaaagggctaatatccagaatctacaatgaactcaaacaaatttacaagaaaaaaacaaacaaccccatcaaaaagtgggcaaaggatatgaacagatacttctcaaaagaagacatttatgcagccaaaagacacatgaaaaaatgctcatcatcactggccatcagagaaatgcaaatcaaaaccacaatgagataccatctcacaccagttagaatggcaatcattaaaagtcaggaaacaacaggtgctggagaggatgtggagaaataggaacacttttacattgttggtgggactgtaaactagttcaaccattgtggaagtcagtgtggcgattcctcagggatctacaactagaaataccatttgacccagccatcccattactgggtatatacccaaaggactataaatcatgctgctataaagacacatgcacatgtatgtttattgcggcactattcacaatagcagagacttggaaccaacccaaatgtccaacaatgatagactggattaagaaaatgtggcacatatacaccatggaataatatgcggccataaaaaaggatgagttcatgtcctttgtagggacatggatgaaactggaaatcatcattctcagcaaactatcgcaaggacaaaaaaccaaacaccgcatgttctcactcatagatgggaactgaacaatgagaacacatggacacaggaaggggaacatcacactctggggactgttgtggggtgggggcaggggggagggatagcattaagagatatacctaatgctaaatgacgagttaatgggtgcagcacaccagcatggcacatgtatacatatgtaactaaccggcacattgtgcacatgtaccctaaagcttacagtataataataataaaaaaaattaagttgtattctaggtgtggtgggtcgtgcctgtaaccccagtgctttgggaggccaaggcaggaggattgcttgaggccaggagctcgagaccaccctgggcaacataagaagaccccgtatttacaaattaaataacaaaaaaattagtcaggtgtggttgagcacacctgaagtctcagctacttgagaggcagaagctggagaatcacttgaatccagcagttcaagactgaagtaagttatgactgtgccgttgcagtccagcttaggccacagagcaaaatcttgtctctaaaaaaaattaagttgtataaaataggagagaatatatcaaagtacatcacacagaataagggaaggtattattttgtggaattttatttcagacaagtgtgtgtgtgagtctgtgtgctgtgagttgtagtgcacattaacagtgtctcaataatacttgattatgttttgagcctgatgaacctggttataccctatgtgaatacctggctgccagatcaatagcatatgaaatacctgaaatgcactcacggcctgcacaagccattgaccagtggctcatgcacacctttatccagcttatctagctccagaaagtctaagactttatatgtgtgctgaaccactaaaatgggaattctgagagagaatgctttcaaaaacataaagttagctaatgggacaatttcaagtaggctatatactttagaaacacatgaaaggataagtgcaaataaaacatagtatatatatcaaaagagcagaaacaaggaatcataaaatatgaaataggataacagaaataagatgctaaatgtcagttgtgaattaatgaattcatatggattatggttttgtattaaaagacagaaacttttagattgagtcaaaagagataggttacaactggtgcaatggctcatgcctgtaatcccaacactttgggaggccgaggcaggtggattgcctgagctcaggagttggagaccagcctgggcaacactgtgaaaccccgtctctactaaaatacaaaaaattaactgggcgtggtggtgtgcgcctgtattctcagctacttgggaggctgaggcaggagaattgcttgaacctgggaggcagaggttgcagtgagctgagatcgtgccactgcactccagcctgggcgacagaacgagactccatcttcaaaataaatcaataaatacatataaaaccaaacaggaataaccatattaatcttaggcaaagtagaattaagagcaaagacattacaaacagtgaaaaagatttacttgtgtcattaagcaatatatttcacaatgattcttaagtaattatggaccattttagcccaataatatagcaacgagaaacataaagcagaataagaaattggcaaaaatacaataccattgagaaattttaagttttctccaattgtgatagatcaagaaagcaaaaaacaaacacagaaaggatctgaaatatatctgcttgcaatcacaagctatggatttatatgattttttgctaacgaatcaatgaagacagattttattaggcattcccatattcccatacactcattttgaaagaacatttctgtatttcctgatacaatgtttctgaggtctgaatctagcagaatagttcaggaaaggtagcaaggggagaacttttgtggtctttttcctagcaaaatgcaatttcagtgccatgatctctattctcagttgcctcaaatagctgtactattcatgttttatgttttgtatttatttccttctattttggttttaaaaaatataatgatgactgggaaataagtgataacatcaaaaggaggcctccagaatttaaaaacattttctatagcccatataaaaaggagcaaaaggctaacataacagccacacagttagagttccttagctgcaccacgtgaggaagacagaccgtcaaccttcattaaagtcttcagcttggtgaaagcacaagcagaacactgagtgacaatgttgtaagagtaacggagccaatcctggaacatcactaggtatggtacaggcaacataacatattctccaagtgcacagattctgcagtggaactgcctaggctcaaactgattcctctagcaactacctgagaccttgcaaaattaacttgatctctatatttttgttccatcattatacatggattagtctctaccttatagaattattgaacagattaagttaaaatgcacataatttttttttgcaagaatggaaaacctaatcctaaaatttctatgaaattgttagggatctaaatagctaaaacaatctggaagaagaacaaagttcagtgaatcacacttcatgaattcaaaacttctaaccaagtaacagcaataaaatctgtgtgattttgccccaagaacagacatattcttcggatagaattgagactccagaaataaactcatatatccatggccaattaactttcaagaagggtgtcaagaccattcaatgggcaaaggatagtctcttcaacaaatggtgctgggacagctgcaaaataataaaggtggactcttatcatacatcatacagaaaaattaactgataataaaccaaagatctaaatataagagaagaactacaaaactcttagaagaaatcatagggagaaatttttatgactttaaatttggcaatcattttcagatatgatatcaaaagcgtaagcaacaaaagaaaaaaaaattggacttgaaaatgaaaaacatttgtgcatcaaaggacactatcaaaagtaaaaacaaaaatctacagaatgaaggaaaagatttgcaaatagtatatcggataagactctttatccagaacatagaaagaactcttacaacttagcaacagaaagacaaaaatagatttaaaaatgggtgaaggactagaaccaacatttctccaaagatatgcaaaatgcagttaccaacaactacatgagaagattctcagcatcatgagttatcaggaaaatgcaagaaaccacagtgaaaaaccatttcataccctctgaaatggctataattaaaaaaatgaaaaagtacaatttctggcaagattgtggagaaattggcacctcatacactctggtgaaaaggtcaaaaggtgcagctcctgtggaaaagagttgagcagttccttagtaagttaaacataaaattactatgacccagaaattctacccctatacatctttgagtattaaaagtgggttcaaacaaaactagtacaggaatatttatagcagcactattcacaatagccaaaaggtggaaacaacacaaattttaatcaaatgatggatcgataagcaaaatgtgatatatcaacccaaattttcatcaaatgatggatggataaacaaaatgtgatataccaacacaatggaataacatttattataaaaggaatgaaatactgatacacgctacaatatggatgaactttaaacacattattttaagtgaaagaagccatacacaaaaggctacctattatatgattccatttatatgaaatatctaaaatgggtaaatctgtagaggtagaaaacaaattagtggtttccaggggctggaggaattggaagtggctgctaatgggtaagaggtttccttttggagtgatgaaaatgttctggagctacataatggtgatgggtgtgcatcattttgaatgcattaaatgctaccgattgtacactttaaaatggttcaaatggtaaacttatgtgtattttactacaattttaaaaattaagtgtatgtaaatcgcttagaacagtgcatggcacaaagtgagtgctatatcactgttggtttttattattcagaacctgcctatgtacggaacctaacctgctgtatataaatctagggatggaaataccaaagttgatcaaataactgtttatagaactttgtacactacaaacaaagatgacatcatttttccagagcttacatataataatttgggttagacagaaattcttaataaatatcacaaataaattgtatagtcatagtctatgaccaacgtacaaaaatgaaagacttcttagaaagcagagattgtgtttgttcgatttactttttaaaatatattaaaacttgtcctgattatattatatggttctctttgcagaaaatttagaaagtatttaaaatgagaaaaaaaaaataaaatcttacaatcccaacactcagagatacacccggaatttttttttcaacatttttgctttagttttagtttagttcatttatcacagaaaactacacagataggtacttactaaagatgtggatatgataataatggctggaaatctatgatgtaaaaatgtaggtccagcctgattttgtcagcaccatataagaaggattgggttttttttttgagcaaaagatattacatttgcagttggtgtcaaaatataatctgtaaagataacttgggggaaattcctcaaaagtatacttctcaaatagtctcatagatgttttgaataatcttctagaaaccaaggtgaaaagaaatttatcacaagaatgtgaagctaaatttcctaatttaaaatcactacgaagtaagtttgagataccatccctactttcccctctattcagaccttttctgcaaaggagttcacagtgggtgtctgtttctctctaaaaaccctatttcacaccaagctaaagatatctatagatttggcaactagtccagctcatctcaggctgaattttggggattcattggggtttacagatgaaaaatgattgtagataccatctactcggcgctttattgaaaaggcacaagaaaactgaggcccacgggtgttaaatgatttttcatggctaaactagtctgccacaaaattctggtcatttgtcatttgtcattttgagtagttgatactgactgcctactatgtggctgacaatgtgtgggacacataagcaaagacacaggtttggcttttaaagaatttatagtcatgtattccctggcatacagttcctgtaactctttcctgtgccaattaaatagacagctagcaaggctctcttcttggatccctgaaaaaaaaaaaaaaaaaagagatgccttgtttcttcacttaacatgtgcttttcagactgatgtacctgctgtggtatgagtcagatgcacagggcaataatgatctgtctatgcggagcactcactgtgtctaaccagatgaaaacaaatatttcctctttcctttcctcctccccttcctcctgtctcttcctttcccttctctcttctcccttcttgcctccctctctctctccatcctctcttctttccttcctttttccttttccttcttcctttctctccctctctgcttatctctccttctccctcccttcacctccttccttgcttattcaaccaatatgctactataaataccaatcgggaactgtgctagattctggggatacacggctgaataaagtaggcatgatgatatcacaccagtccctttgtttcctccaattaaattagtatattatgacctagaatgcaaattttgtatgaatttttaagtaaacacaaaaaagcttttggagactcctggtttatgccataatttcctagttgaagtgatatagtactgtattttcaaattggttcttagcttcagaatctgattttcagataaaagctccagcttttccttgaaaacactaacttacctcctgtttcagaatttttgctcttgctcttccctctgccttctgtcctcttttcccagaattttcagggttggctccattctccttgttccacgtttagcataaatgtcatctactcagaaaataactccctgctacccttttcttaagcagttttcggcattcatgtttatcatcttacctggttttatatgctttgtattatttttgactgtttttatcttattttaataagatagttgttgttccatttattatctgcgttccctcccaccatccactgtgcccaacctccgtgtatcctccatgggagcccatttttcttcctgccctgggctcagtgtctggttcacaatctgacatgtaatgactgaatcatcaaatgagtgcaggaattcagggactgcgaatcaagtcatattagaaaaaatggttctccatttggaagaagatctctggtaagtttagaattagaaatattggctttattcttaagattcctggagaaagcaaggcaatcgtctttttttcatagcaaaaaaaaaaaaaaaaaagaaaaaaaaagaaaaagacttcaccatgtttagtcttcagctaatcagtatgggggaaaaacttgatcttacacctttctgttatactattaagtagccacatcaagagagtttccttggagggtttctgaagctacgaagatgataacagcttgggtactggagaccattgtagctttcagggtcatcttgccccagtgacctctttattaagtgccatttaaggctttaattcactatctgcttgtgtagttgtagaaattaaaaaaaaaaatcatttctttgccaggaaccctttccaaatttggggcacttgtaagtcacacagagttttcccaaatgctgggcacaccccccagtagagtatgcagtgtctaattttgtttgagttacatccagtttggtttgccccatggagcaacacaaagaatacatcttttttttctgtgtaatagcacttcaaatatatgaatacatatacaaatattacactacatccctttcatttgttttttcttcaaactaaatgttttcatacttttctgcttaaaaaattagagtagctatgtttgttttctgttttctttctgtaattttcttttctctctgacttttcagaaatcaccaatcacatacgtaggtttgttccctagtctgtaactactgatagctactgcttattttaataatatattattaatacttattaatcatgatagttaattctaatcatagaaaatgcatagtaagcttaacattttactttgtttcaggcatcagtaagtgtattccattaaacattttgtttaatctttacgcaattattataaggcaagtgccaacattgcctgcattttaaagacaaggacacataaaaatgtgggcacataatttgccttaatgttccccagccttgagaagtaaaactagatttgaacccagttctgtgtgttcctcatgcctgtgctcttaactattgcactattttatcctcccctagggtatcttagaaaatgctgatctctcttccctgtatgctacagagtatgctcagtagatcctctcttccctgtatgctactgtatgctcagtagatccttgatacttgctctcacttggattacagcaatgtctaatagactcagaatgtttcaagcaactgcctgccccctgtgtgctgggcactagtattgctaacacataagcactgcacttgagaggatgtttaactataatattctcagaaagaggccaaaatcatgtttatttaatacactaaattaataattaaatttaaactaagttaaattcaaattattgaatacaatttaataatgaccctatgatatttattttaatggatttaaatttctcctaaaattcacatgacatctaagccagtaagagttgtttttgtttttgtttcttcctatgtgacactttagtaatggacccacagagaagcgaacaactccccacggtttcagtgttcatgcttttggcttctcaccatttggcagaaataggaaattatacctttttaaaactaaaagccatataacacctttgttaataactctttagtttggaaatgaatctccttataactcaaacaaagcaatacatttattcacagagagctatttctcatagcatttgataaaattagtttaattctagctagacttagaattgaagtaagcttctcatactagaaaactggattcggccataaatactgggctcccttgtgccatttcccccacattggtagctgagttccagtaaaatccatccaccagactggaagaggaaatactactcatttatgcatttaaataagatagaactaaaatagggtagtttacattttattctatgatctcatacccaatataacagaaccaagatgaaataaaatcacttacctgacaatagtaatacaaagattatttttccatacatcctgagatcacgagctggctcctgaagttagtgcaaaaaaactaccaaagacaactgcaagtgtcagtgtctggccttagcctgctagctgttatcttccaggcccaccttcctgtggccatcatcagctgataggcaggggaggcattttaaatgatgcaagttgttaagcgcctgttaataaagatacatggatatcttggggctatgaaagtggtaagtacaattttcactgcaaggaacaggtggctacttgtgatattaactttgcatcagttaagtgggcatggtaaggtggtagacaggagccacccaactggacaaagaactggactgtgaatctctgaggccagggcacgtgccaggctgaggtagctgttgtggagccatagaccttctcatttctaatgtcaagacccggtggtccagatgaaagtgacttcctatatgtgaaatgaacatatttgagaaatttaaatcatttgagtgttctgaggttctgaaagactcccaaactcatggtgagtcacacagcaatgtaagagacatgagatgcaacaaatctttcagtgaaaatagagtttgaactgaagagctagtgctgtgcagctatgaaaccagtgagctgtttctgtctgaaatataccttgctaagtaagcataaatgaataccaagacaataaatgaaaacagtcagaaacaaaacccaacaaaccaaaaaccttatcattaaagtaggttaaaatgaaaggtatggaaatgtgaggaagctcaattttaaagggagacagaacaaaaaatataaattaggtctgaaatggttcaacagaaggtgactggatactccatctaaatcatcttacttcctgtaagatttttgtgaaagtctttcctgcctgacccagaaaatcaatttgctatgtaagcaatttgccacatatatcatacttacatatttacccaaagtgtggtttaaaaaaatcatttatgaagctaatgtttgcagattcaggaaactggaccacagagaaaaaaaagtatttactggataaaagatggagataagtatcagcagagcatcccagagagggaggagcctgagattgagggactaatggatggagggagtggagatgcagacttgggagagacggaagaatgaatgacacagacggggtaatctgagcagcaggaaaagaatccagagtgcctcttaaggccctgccaattcatgtaaaacaactgcagcaaattttattaaaaacttaaaattaaacaatacataataatttaataccttccataaattcagtgtttgttatggctggatatcagtttgggttgcaggaattgtgctcaagagtcaaccaagtaaaggaaatgttgttgatattcatataagcagtaagaattaattcacatgattttatattgacaaagggagagcgattagcatgagtcttaaaaatgctatttctgaaaatgggtaaataaatgtcactattcttacgatggactattagagcaactattaaaatcatgttttcaaaaataaagatatggagactcaggataaaatggataagtggaaaacagcaagatctgaaaattgtatatacacaaataaaatcctattggattctttttttcctgggttgtgctatcttcacctggaatacacctactcctttttaggtggcctccaattctgcttagggtcttcattgaatagtacttcctccacgaagccttccctgacttcctgtctttgtcaggtgcccctgctctatacttgtgtggttccatcttcttcccttatcacaggacttattacactacgttgcaatcattgtgtctccactggactacagtttttaagtggacacaccctgactatggctatcttatttaccaatgagtgcttggggcacacttgacaataaatatttctcaaatcaataaatgacaaatgaatattgcagtgcagaggaaagcaacttctcacgggcagtcctgggtgtataggctgatcattttttatatatcctgcgggtaacctatgtcatatcctagcttcaggttccctccagtatggaggtccattgctaaggcaggaaggggaaaatgaaaaggaaactcagcctaaaattcagctttcataccttcttcagcctggactggtcagagtctgagagtgctttcttttccatgacctcccactttcctttcctgcagaatcacatcgttagcaattctctaaactcctgtagtgctgacacaggcctgtttattaacacctgtctcaggttgttgtgaacaatctgttcctttgtatttgtgggtcctgtctctgttgttctgtttccagcatctggcacaatgccctatagagtacctggccctattaaagtaagtcaaaacctggagggttctcaatgaggaaatcagaggtcagattcagcacctcacacagggtgtgaggaagcagtgccgtacagtgctctctagtggcgtatctgcacaatggaaggaaaaaatgtgagccccgtaaatgcaacaacaaaaaaaatacatcagattacatttttctctttcaggcattccttaatcttctttaaatttttcagaaatatttttactgaagtacacattcataattatcataaaattctacctatgagctatatcatgcaaattattagacaaatccacatcttttaagaattttgaatctttgcataaaataaaacaagtacttttgaggcatttaatcaaacataaaaaacttatccaattttcttgatactacatgtctttaagctattttttgaattgcccgagtcatttctatgacgtagttaagaaggatgaagttcaatgttataatctaggaaaggcaacttggatcgatcaacacaaacttataccttgcttgtttcatgacagagaaccattcatttttgtcaattacttacctctcaactatttcaggcttagattattcctgaagatggttgcatgctagtctgatctgccagtggagaagtgtgcttttcatgttttgcatggaggagtggagaacaggggaggggcaggaaagttgaggcactgtggtttatactactagcctccttggtacctcatcgccttagaattgtccagcctgccttgccagagtagtctaagaactttccctgacctttgttagtttatcatttcaaaatttttttaaaataaaaaaacaactacaagtaagataaatctaacactcaaaataaccctgttagagaggcagaacagatattagcattcttattttattttattttatttttatttatttatttttttgcaattaacttgtactttattttgaagttgtgaccggaaagttgttttaaagtctgtctttaaacttacaaatattatgtcaaattgctcctaagagaggatcagtagagatttagttcttatagtatttcctcaattatatttggcaaattagattttcaaaacaagagtttaacttgttattaattcttcatgtttacatacttaaacctcaggtagaaaagtattacaagctatcagtggcgtctgcaatataggtgggaaaggtgagtgcaaagaataacacatattctatattaacagtaaacatagctatttctgttctccctcagctaccaaaaactgtcttaagcctccagatttaaaaccgctgggttcattcactcattcagccatttatttttgtgagcatctcttaggcagtcatgtgctatgctaatcctatctgactcttccctctcctttgtccttcaaaccccgttagtggccaagtcccattaatttgggcatgtcccacttctcctctttccaaatttctgaagtataggtcaagtcctcattaaccactgaatatgcaccaaatggaagattatgcagtcattaaaaccactcataaaaagtatacaacatgaagaaaatcattcaagtaaaaagaacagaaaactgtacaaaatattatataatcacatccatgtaaaaaaagaatttggcatggaaaaagatgaagaaaataacatactaagaggatctctggtggacaggtactttgcctttacgttactgcattttgcaaatttcccgtaataagcagttattattctagaagaaaatataaatgagctttatttttaaaacttactattttagttagataacaaattactcctgaggttcagaactgtatatcagaaataaccaaaataaacacaagcatgcagctaattctttaacctaattccttaaaaactaaaaggtgcttttacccatgcctcttactgcatttccacatgcctagaaaacctctcctctacaatgttccagtgagactccgatgtcagctttcataaaataagttgttcttaccaactattccacattatttttaaaacttcagtgatctgctttctcctaaactctaattctcatttttccttccaaagcatcctagatttgccttttcctattaccactggtacccactggtacctgcaatcctcttttctctaggaatctacccttaattctagtacaaaactaatctttaaacactgctttcataaaatcacttgtctttctgaaatgtgcaagagcttccacttgactcaaatctaagcctattgttgaaccacaaatctccactcgaccttacatcttatttcttcaaaccaggcagaactacactgttccttatatttaaaccatgcctactctgttttcattgtgctattcccaattttccatgtaaaatgtccttcttctggcccctgttaatctaaaggccaagctcaaggcccactccaagtcctccaatcatctctttaagtattccagcctatactcatctctcttctgattccctgttgcacttacagttagtatcacaaagtgtaacaattgttctgtgactattgtgtatagattggttttgtttccacaaataagatactagacaaataaggtaccagaaagcagagaccaacagacccaaggaaaacgctagacacataaacagttaatactaaatgaataatttttttctacagtcaaaatactaatgctccaaaccatttttaagtcgtcttatttgaagttatgtgagccaaaaagtaaatctgtctcacattttatttttatcctgccaaaatttaaagtctataacttggtagaaaaaaacaatcggacaagaaagtttaattttcctctcacttaattttatctggtaaaaccaggacttcaggaataaagtagaactgtacatttctcccatctcttctgctcctttcagaagtatctccaactcaggagatatggaaagtaccttcttttcttaaattatatggtaatattttttgtctgttacaaaaataataaaaagacatgctcaacacataattaaccatatgactataagtctttttgatcaactcaggaaataattcttgaactactttttgttcagagaaaaagtgcaggatctagcgaagtaatgtgattgctcagggtatcactgaccatgcccagttgttcctattcttctttcctttcccaagttcgtcaagtgtctctgaggactcagtcaagtgtctctgaagatttacccttcccattattctaccaaacctaaacctaaattcagcccaactggagacattaaattctctaggttttcaagggtcacagcattaagagactagacagccttgagataagtaccaagtttatataacatgagttaataaaataaatggtcacaaggactcttccattcagtgtagattaacaactatttgcacacaggcttaagcaggacgagcaaagtggaaaaatatttcgctagtagtatttgtccgtgtcccaagaaaatctagaaaagaacatctttttaattgacatgtcaataaatataaactactatattatttataatgttaagctacctgaagcatgcctcccctgattctgtggcattctttggaagagatcatggttgtattcataatatctgtagtcttcatgtgcacgatctccaagtggccgctttctctgaccatcaacaaaattgtctgaataataatatcgggaaccagagtctccattttcaacagcaaaactaacttccgttacaaatgactgagaagaaccatactctctagggacatctgctagacttctggcaagataagaaggtgcagataatctgttgctttctcttctcattattttatgaggtgttctttgaattggagttctaaggaaactctggtttcttgaaactactccatctccagaagttgaaaaggcattagggcttgaatctggaagacagatatcagttcgtcctggaatttttggaccatgctggatgaatgaaggcataagattccgaagcagaggcgacgtctccttcttcacgtacttcccctgcacctcggccggcttggacacttcgtttttggttttctgtcgggacagcatccttctcgaccaggcccgaggccgcgctgaactgcctcgctagggctccgcgccgggcgccggccgtctccgccgccacctccgccgccacctccgccggcgccgccgcctccttccctccggagccgccgcctccgccgctgcctgtccggagcctggggtcgcccgcagggactgccgcatgttcagggcgctaaacgcgccggccgccgctcagtcgctggtcacttccttcccggaagtcggcccgctctgcgacgctgctcggggaccccttgaggaaagcccagcgacgccgggccagcgcattcttattttatgtatgagcaaactatggaatggaaaagagattatgagttattacttgatttgatttgccctaagtgttttttaaacgtatggatttagcgccaacatttaaaaagaaggtatattttaattaaaaatcaggaattgatttaatttaaaatttggctcctcttacaggaagatctggcaagagttagcgtgcagttctacattgtgacaattcatgagagctaaggactggctgtctcttgggacaaataggctttcttgagtctggtaagtgctccacttgatgcttgcttccatttcttagattaggttctactgtggtaaggcctcaaaatctcagtgtcttgcagcaacactggttcatttcctgctcacattacatttggtctatgacggtgacaagttccaggatccagactgaaggagccacccccatttggaatatgctgttcttgttgcaaactgggggaaaaaggccagataaggaatggcttttaatgcttcctctcagactgtgttatggtttttttctcacattctattagccaaagtaaatcagtggccaagctgacctcaatgggacaagtaaatataattcttccaaatggaagtcctgcaagtcataggtcaatggtgaggatatataaaacacttacaggaagggccctaataattgggagcaaaaacacaatccatcgcattcatttatactctttctaagcttttggcatttgggtttggaaatctaatttatttaggagtcttcttcaacaccttctagtgatgagatttctttaacccagttttcagtttcctttctttaaaattataatgagatgtgatgtgcgttgaagaaaccccagaagtgagaaactctcatcactacaatggtgatgtagacagtggaaaactgttcccagttgcctctaagtccatcgtgctatactgctggaatcaggtatcatacataatctttctgctgagaattgataggtccagcttgttctacatccaaataataattcaaccaatgatttgtgagcacctaccgggcactgtgccaagtgtggaagacacaaccttcagtaactcaagtttcccttcaggaactgacagcttaatttggaaacaaataaattaagaaggcaattgcattatggagtgtcaagtggatgatagtagtaagcaaagggtgttataagggtacataagaggggtacctaactcagggttgaggttctggaaaggttttccagagcaagcaatgagacctaaaggatgagtagacaagtcacgggagaagtaagaacattttaagcagagaaaacagcatgagcaatggtctgatatcaagaaaggcagagatagtgcaagaatacacaatgtagtagttttcaaaactgtttgaaattttaatctcacatttgttcttttcaatgtctaggatatcaattcattctgcgatttacctttgtaaagatgaatttagccctggttctctatatgaatactagaggaagtatattgataaaag

SEQ ID NO: 405 - DNA, 901 bp, Homo sapiens
cacggaggggcagagaccccggagccccagccccaccatgaccctcggccgccgactcgcgtgtcttttcctcgcctgtgtcctgccggccttgctgctggggggcaccgcgctggcctcggagattgtggggggccggcgagcgcggccccacgcgtggcccttcatggtgtccctgcagctgcgcggaggccacttctgcggcgccaccctgattgcgcccaacttcgtcatgtcggccgcgcactgcgtggcgaatgtaaacgtccgcgcggtgcgggtggtcctgggagcccataacctctcgcggcgggagcccacccggcaggtgttcgccgtgcagcgcatcttcgaaaacggctacgaccccgtaaacttgctcaacgacatcgtgattctccagctcaacgggtcggccaccatcaacgccaacgtgcaggtggcccagctgccggctcagggacgccgcctgggcaacggggtgcagtgcctggccatgggctggggccttctgggcaggaaccgtgggatcgccagcgtcctgcaggagctcaacgtgacggtggtgacgtccctctgccgtcgcagcaacgtctgcactctcgtgaggggccggcaggccggcgtctgtttcggggactccggcagccccttggtctgcaacgggctaatccacggaattgcctccttcgtccggggaggctgcgcctcagggctctaccccgatgcctttgccccggtggcacagtttgtaaactggatcgactctatcatccaacgctccgaggacaacccctgtccccacccccgggacccggacccggccagcaggacccactgagaagggctgcccgggtcacctcagctgcccacacccacactctccagcatctggcacaat

SEQ ID NO: 406 - DNA, 31737 bp, Homo sapiens
aagcttgttcaacatatgcaaatcaataaatgtaatccagcatataaacagagccaaagacaaaaaccacatgattatctcaatagatgcagaaagggcctttgacaaaattcaacaagccttcatgctaataactctcaataaattaggtattgatgggacgtatgtcaaaatagtaagagctatctatgacaaacccacagccaatatcatactgaatgggcaaaaactggaagcattccctttgaaaactggcacaagacagggatgccctctctcaccactcctattcaacatagtgttggaagttctggccagggcaattaggcaggagaaggaaataaagggtattcgattaggaaaagaggaagtcaaattgtccctgtttacagatgacatgattgtatatctagaaaagcccattgtctcagcccaaaatctccttaagctgataagcaacttcagcaaagtctcaggatacaaaatcaatgtacaaaaatcacaagcattcttgtacaccaataacagaccaacagagaggcaaatcatgggtgaacccccattcacaattgcttcaaagagaatacaatacctaggaatccaacttacaagggacgtgaagcacctcttcaaggagaactacaaaccactgctcaatgaaataaaagaggatacaaacaaatggaagaacattccatgcttatgggttggaagaatcaatattggaaaaaaaatactttaaagttcatatggaaccaaaaaggagcccacatcgccaagtcaatcctaagccaaaagaacaaagctggcgtcatcaggctacctgacttcaaactatactacaaggctacagtaaccaaaacagcatggtactggtactaaaatggagatatagatcaatggaacagaacagagccctcagaaataatgccacctatttacaactatctgatctttgacaaacctaagaaaaacaagcaatggggaaagattccctattcaataaatggtgctgggaaaactggctagccatatgtggaaagctgaaactggatcccttccttacaccttatacaaaaattaattcaagatggattaaagacttacatgttagacctaaaattataaaaaccctagaagaaaacctaggcaataccattcaggacatagacatgggcaaggatttcatgtgtaaaccattctccccatcactttcaagtacaccaatcaaacttagatttggtcttttcacatagtcccatatttcttggaggctttgctcatttctttttactctttttctctaaacttcacttctcacttcatttcattcatttgatcttccaacactgataccctttcttccacttgattgaatcagctacagaaacttgtgcatgcatcatgtagttctcatgccatggttttcagctccatcaggtcatttaaggtcttctctatgctgtttattctagttagccattcatctaatctttgttcaaggttttcagcttccttgcaatgggttcgaacatccttctttagctcagagaagtttgttattactgaccttctaaagcctacttttgtcaactcatcaaagtcattctccatccagctttgttccattgctcgcaaggagctgcaatcctttggaggagaagcggcgctctggttttttgaattttcagcttgtctgctctggtttccccccatatttgtggttttatctacctttggtctttaatgatggtgacctacagatgtggttttggtgtggatgtcctttttgttgatgctgttcctttctgtttgctagttttccttctaacaatcaggaccctcagctgcaggtctgttggagtttgttggaggtccactccagaccctgtttgcctgagtgtcaccagtggaggctgcagaacagcaaatattgctgcctgatccttcttctggaagcttcatctcagagggacacctggctgtatgaggtgtcagtaaatccctacgggcagctctgtctattctcagagttcaaactccatgctggagaatgactgctctcttcagagctgtcagacagggatgtttaagtctgcagaagtttctgctgccttttattcagctataccctgcccctagaggtggagtctacagaggcttccagggctccttgagctgcagtgagctccacccagttcaggcttcccagctgctttgtttaactattcaagcctcagcaatggtggacgcccctcccccagcccaggctgccaccttgcagttcgatctcggactgctgcactagcagtaagcaaggctgtgtgggcatgggacccgccaagccatgcaagggatataatctcctggtgtgccgcttgctaagaccattggaaaagcacagtattagggtgggaatgtctggattttccaggtgccgtctgtcacggcttcccttggctaggaaagggaaatcccccgaccacttgtgctgcttcccagatgaggtgacaccctgccctgcttcggctcaccctctgtgggctgcacccactgtccgacccgtctcagtgtgatgaactaagtacctcagatggaaatacagaaatcacctgtcttctacgtcaattatgctgagagctgcagacaggagctgttcctattcggccatcttggaaaaatcctctcttttcatttatttaagaaatatttgaaaagcaaagatttcatcattttggtgcagtccaatttatctgtttttcttttatggaacatgtttttgatattatatctaagaaaacttttcttagtccaaggtcataaatattttctcctattttttttcctagaagttttacagttttagctcatacaattaggtctatgatccattttagttaattttcgtatatgacctaaggatctaggcttagtttttgtaaatgaataaccagttcctatagaatcatttgttgaaagaacatctttttcctactgaattgtcttagcatctttgatgaaaattaattgactatttatgtggttggattctgaactccacttagttccattgatctatctatctctcttaatgtggattctacactgtcttgactactgttgctttacactgaattttaaaataaggcaatattaagtactctaaattcattcttacttagcaagattgttttggctattctaggtatttttgtatttctatataattttagaatcagcttgtcagtttttccaataatctttctagacttttggcaggaattgcagttaatttgtagatcaattgacatctaacaatattgagtcatctaatccattaacatgatatatctctccatttatttaggcatttatctgagtgatgttttttagttttcagtgcaaagttttcacacttattttattaaatttattcctaattattattgctatagtttgagtgtctctaccaaaactcatgttggagcgcttaagaggtggggcctaatgggaagtgtttgggtcttgggagctcttcctttgtgggcagcttggtactattcttacactggtgagtgagttctcactcttgtgagattagttctctcaggaatggattagttaccatgagaatgagttgctatacggtgaggtcacgcttcatgcttggcctcctggtacatgcctactcccctttgaccttcttctaccatattgtgacacaacactaaagctttcaccagaacccaagcagatgccagtgtcattctttccagcctgcagaactgcaagccaaatatacctctttataaattactcagtctccggtattctgttatagcaacacaaaacggactaagacagaaaattggtactgagagtgggatgttgctgtttagattctcaaaaatgcagaagcatcattggaaacgggtaatgggcagaagatggaaaagtttgaaggagcagactagaaaaagactgtattgccataaacagagcattaaggataatttcagtgagggctcaaaagacaacaaaaagatgagaggaagtttagaatttcttagagattggttaagtagtcattaccacaatgctgataaaaatatggacagcaaaggccattctaatgagatctcagatagaaatgaggaacaaggtattaggaactggagaccaagtcatccttgttagatcatagcaaaaatttgactgtgttgtttctaaggctttgtgccctaaggttttgtggaaggccaaacttaagagtgatgaactagggtacctggcagaagaaatttctaagcaaaatatagagcagctatgtagttactccttactacattcagtgaaatgcaaaatgacaagggaagcaaacacaaaaatttgaaaattaatagcctggccatgtggaagagaatgaaagagcattttcaggcaaggaatccaagggtgcagcagaacaaccaatactaaagagattagcactgagagaagaaagccagttgacaattattgagacaatttttttaaaggccctgaagacatttcagaaatttttgaggttgcctctccagaggtttaggaggacagaatggttttaagagacagaacccatgcatcactgccctgtgctgttttgagatcctgctccccaaattctggcacagccctcagcagccaccccagccatggcacaatcatactcaggtgtggctcaggctgccattccacaagatacaaaccataaaccttggtggcacgcagtcatggatcaagcagcctcagataccgctcatgacagcactctggagggtgcaagtggtaagccttgatggcttttacagccatgtggtagttgctttgcagatgtgcagaatacaagagaagtggaggcatggtggctgctatctagattttaaggaatgtactgaaacgactgggagctcaggtggagacttgttgcagggccagagccactgcagtgtatctcccctagggcaatgctgagcagaaatgtagggttggagctgccacaaagagtctgtaccagggcaatgtctagtgagtccctgaagtggaccaccactgcgactccagaactatatagccattgccaccatgcaacctcagcctggaaaggccacaggtatccaactccaaccagtgagagtagccatgtggctatgcccaacaaagcaatggaggtggggctgcccaaggctttagggataaaaactccccactgtgcccaggaggtagcacatggagtggagaattattctggagctttaagatttagtgtctgccctgctgagttttgaacttgcttgaggcctgtcacctctttcttcttttggcctatttctcccttttggaatgcaactgtctgccatatgactattccaccattgtatcttggaagtaaataactttttattttattttattttacaggctcatagctagaaggaacttgccttgagtcttatatgagactttggactttgacctttgaattattactggaatacattaagactttggggaccattgagattgaataattacattttgtagtgtaagagggacatgactttggggttccaagggtggaatgccatggtttccgtgtttctgtcaaaaatcatgttggaacctttaagaggtagggcctaatgggagatgcttgggtcatgggggctctgccattttgagcagcttggtgcagtcctcatatagtgagtgagttcttgctctcatgaaactggattggtacctgtgggaatagattagttgccctgagaatggattgttataaagcaacccattgtacaaggttgtaccttgtgtttggcctcttggcacattcccacttcctctttggtcttctgccatgttgtgatgcactgctaaagccctcaccagaagctaagcagatactggtgccatgcttcttgaacttcccagtctggagaaacgtgagctaaataaacctctttatacagtctcaggtgttctattataacaacataaaacaaactaagacatttatttttgatgctattgtgattggaattgttttctttatttcatctttgtattgtttgttgctactatatatataaccgatttttgtatattgatcatatactctacaaacttactaagccccctcttagttctagtaagtctgggagggggtgtggtatgtgggtgtgtgtgtgggtgtgttccttaggattttctgcatacaaggctaacaataaaaagagttgtcttttttccataccttttttccttgactattgcacaaattaagtcctgtggtgcattgttaaatagaagtggtaaacacagatatctttgcatgtttcctaatctagagggaagcacattcttaccattaagtatgttggctataggcttctggtagatgccttgatcatttgaagaagttcccttctattcataagttgatgagatttttttaaatatatgagtgttgaattctgtcaaatgcttttctgcatctattgagatgatcatatggttttgtcctttattctgttaatatagtttattacattgatttttggatgttaagtcaacctcacattcctgagataaacttcatttgattatggtataaaatccttttcatgttactcaattacatttgttaatatttggttaagaatttttatgtctaggttcacaagggatattggtatatagctgtgttttcttgtaatgtctttgtcttgttttgatatcagggtaatattgatatcaaatgaagtaaagttagttgggaagtttccttcatcctctatttgctgaataaagtttttgtaacattggtattatttcctcccttaatagtttgatagaattcaccagtgaagtatattttttctctacaggaagatttgaaattactgatgcaatttctttacttgatattggtatttgttttttttctttttccttgagtcagttttggtaatttgtgtctttctaggaattgttctattttatcgaagttgtcaaattttttgccttaaagttattatgctattttcttaacatccttttaagggtagggtctgtgtgatatttctctttgattcttgatcttgggaattagtgtcttctttcttttttcttggtcaatttaactaaatattatttatcttcttgactttctgaaataagcaattttgggtttctttggttgtttttaatgttatcctgttctgtatttatcgttttccactgtgacatttttatttcatacatcctacttacttttggcttggtttactcatctttttctagagtcttaagatggaagttttaattatgaattttagattattttttctttctgttttaaagctatacattttcctctatacactgctttaattgcatcctgtaaatattgctatgttattggttttttgtattttgtttataacattttatttataaaaataggctgggggaaaaggatttataccactgcattctttcctgggggagaactattttgggccatttttgaaattttttttcctcttaacaattttcagagtcacatttgaattccttcagaatggtatttgtcaacaaaaaagttcaagtgaaaagggggaggaaaactgtggaagcatgaagaaagggagtgagagaaggaggagtgggcatacaacagtcaacacataaagaaatggcttttactgaaatgactctgccctgtgcctcatgcactaggtgatgcaagcatgctgctcagacatcaacaccaaatgtcatttagaaatggtagtcttctctgggttctgaaggacacttgttccccaacatgacactattaaatggtgctttcaaggcagacactaagacattactccaaagagaaggttctggtggcagatgctgggaccatattctttatagtccttcttggtgtgacagacctgaaataactccagagttgaggctagcattaagcttccaaaccataaggcatagtgctgcatgtgatggattaccacccgaacctctgtaagcttaggtttgattctcctgccactgagctccttactgagttttaatctggcatgtaccactcttcaaatctctctgtagttgagattcaaatacctgaatatggtcaaaccccttgaaagaacaacattcttatacagtggacaatgcacatcagtgggacagttttgtattcatcaacaacattcaagatggattccataaagtctgggttggcaaactctgggtaaaaaaatatttcaggttgcaggaaccttttgtaaccaacgtttattatgaacttctcctggttgatcacattgatacctgtgtactgtttcatccacttccagggatccacatcatacttagcaaattctttgactatatcagggcaaatgtaacagtatttctccttaatgacttttgtggtctccagtgactgctcaagagggattcctacctccctctcccttagcagttgttgaatgaaatacacagtatcacctacaatcaggatgtgattgatgcagctcccaattacataaccttctacaactgggagaacaagggtgactccatctcctttgtcaatgactatactcattaacatatattcacccacttgttgagatgtccaagatacttccaaggctagtacctcctgaactgcaatgtagaatcctggtacattaaataattcaaacataatttctgcaaaaatgttctgtattttctagtgtattcagtggaagttctgtcattaaaaaataatggtcctcagattctgctcaaagatatttaaaaaccacttgctccatgaacctttccataatatcccagtcttcagtgattccatgtcatattgaccactttgtagcatacatagatttatcaatggcttcatcctgtatgaaaaagtcaagctcatcaactcccctcaacattctcccttgggctttgtcaactacctttgctgactctctgatagaaatgcatgaaagaatagtaaactatggctcagtgttgcctgcacagccaagctcggaatatctgctgaggtgatcacagggctgagacccagagcagtgggtgcagctcaatctccaggtatgggctggatgtcaggggctgagagcaaggcaatggaggagccagggcgggcactgagtggcccttacctgatgccacagtctgccacacaggaaggcaggaaccccgccatgcttggaatacacaacacttagccctactggccaccgtggagcaccctgccaccatccacttggcaacccactcaccccatacaccctgtctcctgtgtgtttccacttttattcattttaagatatattgtagatgggtgcagcaaaccacatggcacgtgtatacctatgtaacaaacttgcacgttctgcatatgtaacccagaacttaaagtacaataaattttaaaaaaggaatattttaaaggatcaacctactatttgacagtcatggaaatagtgaatgggaattaaagggaaaaaaataagtaagcaaaggaagggaggaggaaagggaaaaagaaaggaaagaaaaggaaaagggaaatacaagaaaaggagacaaataaataaataaataaacaaataagtgactgaaagtctgagagttggcaaatactattcagacaacactgacaaaataggcctcttgctaaaaatagcagaatgcacaaagtacaggagcagcctgtctgtcctgagaggctgaggaggtttaggaaaagaggctggggagatttgagacaggtctgacatatgtagtcagtttttgcttggtggaaaaagtaatcacgggtgattcagaaaaaggaagatacttacataataattgttttgtacctttttttagtattctattactttcataaaattatctttgcatcaaaagttattaacactttcaggactccttgtatgcaaaattctttgaattgcatttcttaatttgtgattgcactgttaatttatctagcacaatgaactgaatgtgtgtctttatgtttaaagggaaaaataaaattcaaaacagcatatttgatataatttatgattagataatagagaaatatcaattttaatataatttttagaaagtaaagcttaggccagtcacgatggctcatgcctgtaatcccagcactttgggaggctgaggcgggtgtatcacctgaggtcaggagttcaagaccagcctgaccaacatggagaaaccctgtctctactaaaaataccaaattagccggcactaatgattcatgagaaatctgcccccatgatccattcacctcccagcaggacctatctccaactttggggattacaattcaacatgagatttgggcagggacacatatccaaactatatcaacagagtttcattgtgttgctcgggctagtctcaaactcctagcctcaagcaatacttctgtctcagcctcccaagtacctttggggattataataatcaatcatcttcactttttacaatctactttggtttaataagttttacttaattccagtgttatatagcaactttgatccaatgtatctcttatatgctatgagctcagcagtattgttatagttattgcctataataatcagatgattttttaaaaaaagagatgaaatcagaatacacacacacacacatacacacatacaatcttttgtacttacaaatttatttaccatttcccatgccgtttattacttataggttcaagttgccatctggtgtcatatccttttatcttaaaagcattttctttagtgtttctttagcaaggttaagttctttttatttttatttatctggaaatgtctttatttcagctccatttttgaaggatcgtttaactggatacagaattcttaattgacagttatttttccctccacttttgaaatgtcgcttcataaggcctccatttttttcagataaaaatgccagtattgataacattattgttcccctgtatgtgataagtcatctcttgctactttcatgattttcttattatccttggttttcaccaatttgacaaggatggctctaggtgtgaatctctttgtgtttatcctacttgagatttgttggacttcttatatctgaagattaatgtttttcatagcatttttgaagttttcagacattatgttttcaaatatttttctgccctcttatctctctcttctcctggaattccagttatgcatatgttagtgctcttgatggtatcccataagtttctgaggatctgtttattatccttcattcttttttctttttgttcttcagattgattaacctctattggtctaccttcaagttcactgataatttcttttacaaggtcaaatatgcaattgaacctcgctagtgattttttcactttaactcttgtacttttcaattctagattctatttttaaatgtattctgtctccttattcatatcctctattagacagcacattatcatatttttaatttgaacatatttataatatatactttgaaaactttctttctaaatccaatatctgaattgagacagtttctattcactgcttttttttcagagtatgagccatattttcctgtttccttacatgtctgataatttttaattgaaaactaaacactttaattacacatgatagcaaatctggatttggtttttatttgttattgtctttgttgttgttatgttttggtaattggcctatacttgtgctgtgtaatccttctacccagtggtttccagcattgatgtcttttatattgtgttgttgttgttgttgttgttttagcctgtctttctagggatttcctttgtgtctgttgcatagcttgattttggagagacattacattaaagctagtaaggcttccactctctgccaaataatctgtgggtgggtgggtgaatgcattcaaagttgcaattaatactcaagtcttacttcatttttactttttgtcatactctcttgagtctttcttgcacttccatacttttccaattggccatatgtgtggagaacttttctcaaactttctatgattctctcctttccaggatttctctctctctctctctctttttttttagtaatactcaggtttttaatttattatagtgaatggatacaaagcaaaattagcaaagggaaaaagttgtatgtggtaaagtctggaggataccaggcacaagcttcctggaatcatctcttgtggagttacaaggatgtgtttctctttcccagcatgaaattttgacagcacatgtgcaatgtcgtctaccaggaccagagtctcattagagactcagtactcaggattttatggaggttgctctccttcacatgtaccagaattccagactcccagaggaaaagcagctgttcagagtaaaccacattgtttgtatgaactgtttaggcacagtgagccactcttctcagtgagagaattggaacttggaactggaaaactctagccttgcatgtgtgtctttcttttcttttcttttctttctttctttcttttcttttcttttctttctttctttctttctttctttctttttctttctctctctctttttctttctttcttcctctttccttctttctttgtttctttctctctttctttctttctctttctttcttttttaattttactttgagttccaggatacatgtgcagaacattcaggtttgttacacaggtatacatgtgccatggtggtttgctgcacctattgaccctcaggatctctcatttaaatttttctcttgtcttccacttccccaattgaaactgcaacctcagactatcaaatctgcaattctctctgttcattcccaaaccactctgctatatttaactggcaaaaccattgatttcttccctctactccataccaaatccacccgtacccccagccctaacaggaaagctgctgggttttacatccagcttcaaacttgtaaaactacagtttttcccaactgagcttgggggtgagaagagagatgggagtgtattagtccgttttcattctgctgataaagacatacccaagactgggaagaaaaagaggtttaattggacttatagttccaggtggctgaggagacctcagaatcatggcgggaggtgaaaggcacttcttacatggtggcggcaagagaaaatgaggaagatgcaaaagcggaaacccctgataaagccatcgatcttgtgagacttatccactaccacgagaacagtatgggggggagccacccccataattcaattatctcccaccaggtccctcccacaacacataggaattatgggagtgcaattcaagatgagatttgcatggggacacaaagccaaaccatatcaggtagcaaccccagtcaggaagggctcatattttaccaatcctacccaaaaccctaacacttttttcaagaataaatgcttcttaaatttgataactgcctttgatgagttttcagggtcctgaaatgattgtttttggtacttctccaatttctggggggagttttggtgtagaaataaattgccaaccttttcatgtctccccccaaccttatctttatatcctctgattaacaattttcattagtaatgtgttacacaacaaatacttgtttagactaacctaccttttaccaatttcttttcacattgttctgtcttttttgattctatgtcatatttctaaagcatatctttcagtagatttttccctggtaaaaaatggcatatgttcttaaatgtgtttgtttgacagtatctttcatttgtctttttttcgagtgacagttaactggctacagaattcaacattgaatgttttatttatctctgtactttgaagactttatttaattatcctccatcttctattgttgctgataagaattgagaatctgctctattttttattcaattatgattaatctctctttctctgtctagattatttaagattttatttttgcctttggtagtctatagtttctcaacattttatctaagtatctatttttacttaatcctgattagaactcatttgacttcctgtgtccaaatcaataaaaaccctaatcaattctgtaaaatttgaagccagttttcttctcaaatattatgtcttcttcattctttcaattatgtttctgaaactaccattagttgtgttttaggtcttttccataatctaaatctcattttccacctctttttttttgtgtgtgtgctatgctcttaaataatttcctcatatctactactttgctgtgttctctcttcagctttgtctagattgctatttgggtacttagtgggttttttttcagttgagtaaattttaaagttttttctagatgttctatttaattattttacaatactttcaagtaatttcttcttctcatgtctccaatttttaaaaattgtctctagtccctttgaaaataaatattttatagtgtctatctagtggttctattagctgaggtttttagacatctaatcccattcttcgttgtatctgttaacttttgctcatgggatatttcttcttattttaagttcagattcacttggctttacctttgagactttatgcagtctgggatcaggagtgtctattagagattttttgaattagcatctactaagtgttctagggatacttctatgcagggacaattttatggtaggtttagaactttgggatccctaacctgtgcatgtaatgtaatttgagccctacacataagttggatgaggccagttgtacatatgaattctcaaaaaagactatgccacacagagaccagctaagacaaactgccttgtcttctcaatttgtcaataggatgacattttctggtctatgttttttattttttttttgttttttgttttgttttgttttgttttcttgagatggagttttgctcttgttacccaggctggagtgaagtggtgccatctcagctcactgcaatatccgcctcctgggttcaagcaattctcctacctcagcctcccaagtagctgggattacaggcatgcaccaccagtccaggctaattgtctgtatttttaatagagacggcgtttcaccgtgttggtcaggcttatcttgaactcctgacctcaggtgatccacccacctcggcctcccaaagtgctgggattacaggcgtgagccaccatgcccagcctggtccattattttagtaagagtttagccctccaaggcttccagttttgcaggatgacaataatcagaggggaggaggaaagaaactttgttctaactttctgcctggagtaagtcaaaatcctcctcttctaccctggcaaattctatacagtcagaaaggggtcatagctaaaaaattcatgtaagctgttttaagaatattaaaagcattagcaattataattcatagcaaataaaggtagccatttaattagcaaatggaaatttaccatgttattgtctgttctttacagaaacctatggattcctcagtgagtatcacctagttgccagaaacaagatgtctagtaacttatacctactcatcttaatctctctctacttcctacacataatctaagatactttatatttattcccacaaaatctaggttcatttcttcctgccattacctcctataatacatttatgccaaatatcagttgaattagcctttcaataaaaagatttagcaggttccttttaaaagatttggcaccttgacactgtgatcttcaataaggttgtgaattcttatcacagccaatcatcctcttattttccatcctgataaaaaagctatcttaaaatataaaatgaagtaaatctcatcatattgccatgatgtttttaactatcatatattataagttagcattttcaagatttcacatataggtttttttttattttttttttttttattgagactgagtctcactctgtcacccaggctggagtgcagtggcacaatctcggctcactgcaaccctctctccttttgaactcctcagtgtctattatttccatctttatgtccatatgtacccattgtttagctcccacatataagtgagaacatgtggtatttgagttttctgtttctgagttatttcacttaggataatggtgttcagctctatccatgttgctacaaagaacatgatgctattcttttttatgactacatagtattccatggtgtatatgtgccacattttctttatttagtcatttaagttgattccatgtctttttattgtgaatagtgccacaatgaacatatgtgtgtgtatgtctttatgaatgattcacatgttgaaccatccttgtatttctggagtaaaacccacttaactataatatctttttgatgtactatagaattcattttgctagttgagaatttttgcatctatgttcatcagggatattgaccagtagtgtgtgtgtgtgtgtgtgtgtgtgtgtgtgtgtgtgtgtgtatggctttgcctgatttgggtataattgtgatactagattcatagaatgtgttagggagggagtccctccttgatttttttggattaagtttcagtcacctttgaccctgaactagtatcctagtggattgtacaatgaccctgaactagtggattgtacaatgaataaatgagtgaatataaattattgtaaaataaaattttgttaagtatatgacaaccatacaaatgcaagacaataaacaatgtgatatgaaaactctcagccagcctaccatatttgtgtttgtttttgaactgcatagtgggaggaggtgctccttacaattttcactttgtaaacatttattctttgatttttaaccatcactgctataaccaccatcactagtggattcaccaaaaattaagtaaagaattatcttatttgtttttataaaactttgtaaaatgtatgtagagctcacatttatttcattgtttaatactagaagtgttttggatctttatttagaagcttggtgatgttttgtgaccagaaatatgatgtaggaaattgactcttgtttatatcatttagcctatggtaaaattggttttgttatataccattttactcaaagttgccatttccaatcacctattgacgacgttaagtgagaacttactgtattcaaatatatctaaatattcagtacagtgggccaggcatggtggctcatgcccataatcccagcactttgggaggccaaggaaggaggatcacctgagcccaggagttcaaaaccagcctgggcaacatagcagaccttgtctttacaaaatattaaaaatttttctgggtctcagctactcaggaggctaaggcaagaggatcacttgagctcaggaggttaagcctacagtgagcaatgtttgcatcactgcactcaccttgggcaacagaatgagaccctgtcccccaaaataaatatatattcggtacactgtcagtagagataatctctacatcttatctctactgttccttctgtatccacagttttcttgcagcaccttctaagtatttattgaatcattttactcctctccaaactttctcttttgctctagcttaggctatttgtttccaacttttgcgtggactgtggcagagccttcaatttggtctctgtctccagttttatccctaactaattcaccaaggccgtcatataaaaatcacaagactcattatgttacttcctgcctaaaaccttcccatggtgccttactttgccaaagtggggggagacctttctatgatctggcccaccaagctcatttttctccctcctttccttgccctgtatgttccagcaacactaaattacttgttgaaccccatttaggtgtattgtttcttatcgccattcctttattcatgctgccttctctacttgcttgtaacctgccctttaccaaaataatgagagacatagtgcattagaaaataaagtaaacatttctgttttctttctcagaaaaatgaactgtcatgtatgtttattttctttcttttaagggatgttactggctggttttacaattaggaatgttccattcatcaatgaacatgtccatgttcctaacgcatggtcttcaattttaagaagcattgcccttaacattattctaatacgagctgggcttggactcgatccacaggtagatttacaattacaaatcgagtaaggttatttcaaatattagaggatggtgagaaagaaaaagaagcaaaaattttatttacctgttccaagtggagtctgtaaacaaacctaagataaagaaaaaaaggccgggcatgatggctcatgcctgtaatctacaaaaattagctgggcatggtggcatttacctggtaatcccagctactcgagaggctgaggcaagagaatcgcttgaacctgagtgacagaggttgcagtgagctgagataatgccactgcaatccagcctgggggacagagtgagactctgtctcaaaaaacaaaacaaaacaaaacaaacaaacaaaggttttataagaaaaaccttatacaattctttttcttttttagggtgattaaggatttcagtaattttttatgacgttttctctacaggattatgttcctgattatctttgcattattgtaaaatctaatcttttaaagcatttcttaaaatattacattctagggatcataaattccatctataagaagatgactattcatgaatatgacagccactcaaatatatgtggcaaatgtggtttaatagaaatagctcgagcacaaataattatagccaatgagattatattctccagtagaaagtatgaaccaaggagaaaattgaaaagttctcccttttaaaatgaattatgcagtttttaagttattttctttggcatgttagtattgtatttatacttattaagttaatcaaacagttcatatcaaaaagttaatgggaaaacactaataggacactattattatactatgtattaggaaagttcaggaaggtagcattaactatttaatcacagtaaaattgatcttttaataattaaaatatacaataatattttataaaagatgaaattgtttataatccaacctatgatgacatataaaatataatagagttcaaagtccagtgggacaatctgttgaaatgagattttgtttagtgaaagcttcttatgaaaaaagactttatagaccaacatttgttaaaataattttctttttggccattgtaaatgtatcaaatgtgactgttttgtgtttcaggctttgaggcatttgaaggtggtttgtttcagattggctataggtccatgccttatggaggcaagtgcagctgctgttttatcccacttcattatgaaattttcctggcaatgggcaattctattagggtaatttctttctcattttttcttacgaaaatattcaattaaagaggcttggttaaaactgttaaaatattcagaatattgtatagaaaagctctattaaaattcatttcacagtgttaaaatccttggaaagcacttgattaaaagcagagcatgtcccaaattgcacgaaattttttaacaaacattaatagcccctaaatgtttatcatcaagaaaattcgcgtgatcaatttattccttttcatctgtattataacatatctgtatgctttaatctatctaatggcctcttcctcatggctatatgtaaatacagttgcacatttcatatatatgtatgtgtatatatatatatatatttgagaaacattttatatagacagaagaaagcaagcaaacaaaatctcttgccgtatatccaatgccccatccatctttatctaccatccatttgtcttatgtttgaattcctcaaaataagtctataactactgtctctagatcctaactccttttcatttcttaattaatcaacttttgtctctgcttatccattccaatgacactcatagcaaagttcatccattacatagttactacaaaatccagtgaatttttaaattaatgtttatgataaaatactcaaatgcacttttattttaaaaattagaactttataaataaaggaggaatgaccttaaactatgccttcaaatcataatgcccataactctacccaaagtgacaactcttaggagtttttttcttctccaatttttattttggctcaaggggtacattagcaggcttgttatatggataaattgcatgtcacaggggtttggtatgcagagtgacgattgatcccttctttctgtccatgtgtactcagtgtttagctcccacttataagtgagaatatgggatatttggtttcctgctcctgcgttaattaactttgtgtattattctatggtgtatatgtgccacattttctttatccagttcaccattgatggacatttaggttgatctcatgtcttttttattttttttcattagtttttaaggaacaggtggtgtttgtttacatggaaaatatttttagtggtaatttctgagattttggtgcacccatcaccagagcactgtacactgcacccaaggtgtagtcttttatccctcaccctcctcctactcttccccctaagtccccaaagtccattgtatcattcttgtgcttttgcatcctcatagcataactcccacttataagtcagaatatacaatgtttggttttttcattcctgaattacttcacttagaataatggtgtccgactccttccaggctgctgtgaatgccattatttcattcctttttatagctgagtagtattctgtccatggtctgtgtgtgtatatatatacacacacatacacatatatatacacatatatacacatatgtgtgtatatacacatatatacacatatatacacacatatatgtgtgtatatacacatatatatacacatatatgtgtatatacacatatatacacatatatgtgtgtatatacacatatatatatgcaccacattttctctatgcattcattgattgatgggcatttgagctagttccatatctttcacaattgcaaattgtgctgcagtaaacgtgtgtccaagtatttttttcatataaagacttcttttcctctgggtagatacctagtagtgggattgctagatcaaatggtagatctacttttaattatttaagaaatcttcatactcttttccatagtggttgtcctagtttacattccccccagcagtgtaaaggtgttccctttttaccacacccatggcaacatctatttttttttaattttttgattatggctattcttggaggagtgagatggtatcgcattgtggttttgtttgcatttccctgataattagtgatattgaggattttttcatgtttcttggccatttatatcttcttttgggaagtgtctattcatgtccttaacacactttttgatagggtagtttgtttttttcttgctgatttgtttgagttccttatggattctacatattagcactttgttggatgcatagtttgtaaagattttctcccactctatataggttgtctttttactctgctgattaattcttttgctgtgtagaagcttcttagtttaattaagtcccatctacttatctttgcttttgttgcctttgcttttgggttcttggtcatgaagtctttgcctaagcaaatgtctagaagggtatttccaatgttaccttctagaatttttatagttttaggtgttagatttaagtctttgatccatcttgagttgatttttgtataaggtgagagatgaggatgcagtttcattcttctacatatggcttgccaattatcccagcaccatttgttgaatatggtgtcctttcccaactttatgtttttgtttcctttgttaaagatcagttggcttaagtatttggctttatttctcagttctctattcgattccattagtctacgtgcctatttttatagcagtattatgctgctttggtgactatagacttatagtacagcttgaagtcaagcaatgtgatgcatccacatttgttctttttgcttagtcttgctttcgttatgcgggctatttttgagttccacatgaattttaggaatgctttttctagttcagggaagaatgatgatctatgatcatcagtgataactgtcctgaagttttcttttttgttgtgtctctgccaggttttcatatctgaatgatgctgacctcataaaatgagttagggagggatccttcctcctccttttttcggaacaatttcagtagcattgataccagctcttctttacacttccggtagaatttgtctctgaatctgttgggtcctgggcttgcatttttttttctttttttggctcagagactttttattactcattcagtttcaaaacacattttttgctttgttcaggatttcaatttcttcctagttcaatcttgggaggttgtatgtttccagaaatttacccatttcttttttttttttttatatactttaagttttagggtacatgtgcacattgtgcaggttagttacatatgtatacatgtgccatgctggtgcgctgcacccactaactcgtcatctagcattaggtatatctcccaatgctatccctcccccctccccccaccccaccacagtccccagagtgtgatattccccttcctgtgtccatgtgatctcattgttcaattcccacctatgagtgagaatatgcggtgtttggttttttgttcttgtgatagtttactgagaatgatgatttccaatttcatccatatccctacaaaggacatgaactcatcattttttatggctgcatagtattccatggtgtatatgtgccacattttcttaatccagtctatcattgttggacatttgggttggttccaagtctttgctattgtgaataatgccacaataaacatacgtgtgcatgtgtctttatagcagcatgatttatagtcatttgggtatatacccagtaatgggatggctgggtcaaatggtatttctagttctagatccctgaggaatcgccacactgacttccacaatggttgaactagtttacagtcccaccaacagtgtaaaagtgttcctatttctccacatcctctccagcacctgttgtttcctgactttttaatgattgccattctaactggtgtgagatggtatctcattgtggttttgatttgcatttctctgatggccagtgatgatgaacattttgtcatgtgttttttggctgcataaatgtcttcttttgagaagtgtctgttcatatccttcacccactttttgatggggttgtttgtttttttcttgtaaatttgtttgagttcattgtagattctggatattagccctttgtcagatgagtaggttgcgaaaattttctcccatgttgtaggttgcctgttcactctgatggtagtttcttttgctgtgcagaagctctttagtttaattagatcccatttgtcaattttggcttttgttgccattgcttttggtgttttggacatgaattctttgcccatgcctatgtcctgaatggtaatacctaggttgtcttctagggtttttatggttttaggtctaacgtttaaatctttaattcatcttgaattgatttttgtataaggtgtaaggaagggatccagtttcagcttcctacatatggctagccagttttcccagcaccatttattaaatagggaatcctttccccattgcttgtttttctcaggtttgtcaaagatcagatagttgtaggaatgcggcgttatttctgagggctctgttctgttccattgatctatatctctgttttggtaccagtaccatgctgttttggttactgtagcttgtagtatagtttgaagtcaggtagtgtgatgcctccagctttattcttttggcttaggattgacttggcaatacgggctctttttttggttccatatgaactttaaagtagttttttccaattctgtgaagaaagtcattggtagcttgatggggatggcattgaatctgtaaattaccttgggcagtatggccattttcacgatattgattcttcctatccatgagcatggaatgttcttccatttgtttgtatcctcttttatttccttgagcagtggtttgtagttctccttgaagaggtccttcacatcccttgtaagttggattcctaggtattttatactctttgaagcaattgtgaatgggagttcactcatgatttggctctctgtttgtctgttgttggtgtataagaatgtttgtgatttttgtacattgattttgtatcctgagactttgctgaagttgcttatcagcttaaggagattttgggctgagacaatggggttttctagatatacaatcatgtcatctgcaaacagggacaatttgacttcctcttttcctaattgaataccctttatttccttctcctgcctaattgccctggccagaacttccaacgctatgttgaataagagtggtgagagagggcatccctgtcttgtgccagttttcaaagggaatgcttccagtttttgcccattcagtatgatattggctgtgggtttgtcatagatagctcttattattttgaaatacatcccatcaatacctaatttattgagagtttttagcatggaaggttgttgaattttatcaaaggctttttctgcatctgttgagataatcatgtggtttttgtctttggctctgtttatatgctggattacatttattgatttgcatatattgaaccagccttgcatcccagggatgaagcccacttgatcgtcgtggataagctttttgatgtgctgctggattcggtttgccagtattttattgaggatttttgcatcaatgttcatcaaggatattggtctaaaattctcttttttggttgtgtctctgcccggctttggtatcagaatgatgctggcctcataaaatgagttagggaggattccctctttttctattgattggaatagtttcagaaggaatggtaccagttcctccttgtacctctggtagaattccgctgtgaatccatctggtcctggactctttttggttggtaaactattgattattgccacaatttcagctcctgttattggtctattcagagattcaacttcttcctggtttagtcttgggagagtgtatgtgtcgaggaatttatccatttcttctagattttctagtttatttgcgtagaggtgtttgtagtattctctgatggtagtttgtatttctgtgggatcggtggtgatatcccctttatcattttttattgtgtctatttggttcttctctctttttttctttattagtcttgctagcggtctatcaattttgttgatcctttcaagaaaccagctcctggattcattgattttttgaagggttttttgtgtctctatttccttcagttctgctctgattttagttatttcttgccttctgctagcttttgaatgtgtttgttctttcttttctagttcttttaattgtgatattagggtgtcaattttggatctttcctgctttctcttgtgggcatttagtgctataaatttccctctacacactgctttgaatgcatcccagagattctggtatgttgtgtctttcttctcattggtttcaaagaacatctttatttctgccttaatttcgttatgtacccagtagtcattcaggagcaggttattcagtttccatgtagttgagcagctttgagtgggattcttaatcctgagttctagtttgattgcactgtggtctgagagatagtttgttataatttctgttcttttacatttgctgaggagagctttacttccaactatgtggtcaattttggaataggtgtggtgtggtgctgaaaaaaatgtatattctgttgatttggggtggagagttctgtagatgtctattaggtccgcttggtgcagagctgagttcaattcttgggtatccttgttgactttctgtctcgttgatctgtctaatgttgacagtgtggtgttaaagtctcccattattaatgtgtgggagtctacgtctctttgtaggtcactcaggacttgctttatgaatctgggtgctcccgtattgggtgcatatatatttaggatagttagctcttcttgttgaattgatccctttaccattatgtaatggccttctttgtctcttttgatctttgttggtttaaagtctgttttatcagagactaggattgcaacccctgcctttttttgttttccatttgcttggcagatcttcctccatccttttattttgagcctatgtgtgtctctgcatatgagatgggtttcctgaatacagcacactgatggatcttgactcttcatccaatttgccagtctgtgtcttttaattggagaatttagtccatttatatttaaagttaatattgttatgtgtgaatttgatcctgtcattatgatattagctggtgattttgctcgttagttgatgcagtttcttcctagtctcgatggtctttacattttggcatgattttgcaggggctggtaccggttgttcctttccatatttagcacttccttcaggagctcttttagggcaggcctggtggagacaaaatgagtcagcatttgcttgtctgtagagtattttatttccccttcacttatgaagcttagtttggctggatatgaaattctgggttgaaaattcttttctttaagaatgttgaatattggcccccactctcttctggcttgtagggtttctgccgagagatccactgttagtctgatgggcttccctttgagggtaacccgacctttctctctggctgtccttaacattttttccttcatttcaactttggtgaatctgacaattttgtgtcttggagttgctcttctccaggagtatctttgtggtgttctctgtttttcctgaatctgaatgttggcctgccttgctagattggggaagttctcctggattatgtcctgcagagtgttttccaacttggttccattctccccatcactttcaggtacaccaatcagacatagatttggtcttttctcatagtcccatatttcttggaggctttgctcatttctttttattcttttttctctaaacttcccttctcacttcatttcattcatttcatcttccattgctgataccctttcttccagttgatcgcatcggctcctgaggcttctgcattcttcacgtagttctcgagccttggttttcagctccatcagctcctttaagcacttctctgtattggttattctagttatacattcttctgaattttgttcaaagttttcaacttctttgcctttggtttgaatgtcctcccgtagctcagagtaatttgatcgtctgaagccttcttctctcagctcgtcaaagtcattctccatccagctttgttctgttgctagtgaggaactgcgttcctttggaggaggagagacgctctgcgttttagggtttccagtttttctgttctgttttttctccatctttgtggttttatctacttttggtctttgatgatggtgatgtacagatgggttttcggtgtggatgtcctttctgtttgttagttttccttctaacagacaggaccctcagctgcaggtctgttggaataccctgccgtgtgaggtgtcagtgtgcccctgctggggggtgcctcccagttaggctgctcgggggtcaggggtcagggacccacttgaggaggcagtctgccggttctcagatctccagctgcgtgctgggagaaccactgctctcttcaaagctgtcagacagggacatttaagtctgcagaggttgctgctgtctttttgtttgtctgtgccctgcccccagaggtggagcctacagaggcaggcaggcctccttgtgctgtggtgggctccacccagttcgagcttcccagctgctttgtttacctaagcaagcctgggcaatggagggcgcccctcccccagcctcgctgcctccttgcagtttgatctcagactgctgtgctagcaatcagcgagattccgtgggcgtaggaccctccaagccaggtgtggcatatagtctcgtggtgcgccgtgttttaagccagtctgaaaagcgcaatattcgggtgggagtgacccgattttccaggtgcgtccatcacccctttctttgactcagaaagagaactccctgaccccttgcgcttcccaggtgaggcaatgcctcgccctgctttggctcacgcacagtgagcacacccactggcctgtgtccactgtctggcactccctagtgagatgcacccggtacctcagatggaaatgcagaaatcacccgtcttctgtgttgctcacgctgggagctgtagaccggagatgttcctattcggccatcttggctcctccccccgaaatttacccatttcttgtaggtgttctactttgtttgcataaacatgttcatcatagtctctgagagttttttgtatttctgtgtggttggcggtaatgtccactttaccatttctgattgtgttttttgtatcttctctttttttttttccttattggtctagctagtgacctatcaaatttatttattcttttgaagaaccagcttttagtttcatttatcctttgtatgccttttcatgactcaattttattccattctgctctgattttggttatttattctcttctgctagctttgggttggtttcctcttgtttttctatttcctttaagtatgatattaggttgttaatttaagatccttctaacttttcaatatgggcatttagcacgataaacttttcccttaacactgctttgcctgtgtcttagagagcctagaatgttgtatctttgttttaattagtttcaaagaatttattggtttctgccttaatttcattgtttacccaaaagtcattcaggcacaggttgtttaatttccatgtaattgtatggttttgagagttcttcttagtgttgacttctatttttgttacactgagcggtccaagattgtggttggcatgatttcaggggtttcttttaatttactgaaaataattttagactgatagtgtgatcaattttacaatatatgccatgtacagatgagaggaagatatattctgttgttgttgggtggagtgttctgtagatggctgttaggtccatttagccaagtgttgacttcaagtcctgaatatctttgttcattttctgtctctatgatctgtctagtaccgtcagtgagatgttgaagtctcccactattctgtggttatctaagtctctctataggtatctatgaacttgttttacgaatgtgaatgctccagttttgagcacatttatctttcagacagttaagtcttcttgttgaattgaaccctttatcattacttagtgcccttctttgtctttttgattgttgttggtttaaagtctattttgtctgaattagaataacaatgcttacccttttttgttttacatttgcttggtagatttttttccatccttttacttcaagcgaatgggtattgttgcatatgagctgggtctcttgacaacagataaggttgggctttgcttctttatccaacttgtcattctgtgagttttaagcggggcatttatactgtttacattcacagttaatattggtatttatagctttggtcctaccattatgttgttagctggttattatgcagacttgattgtgtagttactttacaacgtcaatggtctatgtacttaaatgtatttttgtggtggccattaacagtctttcacttccacgcttagcactcccttaaggacctcttgtgaggcatgtctggtggtaacagattccattagcatttgcttgtctgaaaaggatcttacttctccttcacatatgaagtttagtttggctggatattaagttcttggttgaatttttttttttttttttttttttttttttgtgacagagtcttgctctgtccccaggctggagtgtggtggtgttatctcggcttactgcaacctccacctcctgggttaagtgattctcttgcctcagcctcccgagtagctgggactacagacacgcaccaccatgcccagataatttttgtatttttattagagatgaggtttcaccatgttggccaggatggtcttgatctcttgaccttgtgttctgcctccctcagcctcccaaagtgctgggattacaggcatgagccaccacacccagccaagtattttttttttaagaatgctgaaggccgggcatggtggctcacacctgtaatcccagcactttgagaggccgaggtggtcagatcatgaggtcaggaatttgagaccaccctggccaatatggtgaaatcctgtctctactaaaattacaaaaaattgctgggtgttgtggtgcacacctgtagtcccagctacttggaaggctgagggggaagaattgcttgaaccgggaagtggaggttgcagtgagccgagatagcaccagtgcactccagcctgggcaacagagtgatactccgtctcaaaaaaaaaaaaaaagaatgctgaatataggcccccaatttcttttggattgtagagtatcttatagttccactgttagcctgatgggattccctttgtatgtgacctgccccttcattttagctgcctttcatatttttttatttcatgttgaccttggagaatctgatgactctctgtcttggggatggtcatcttgtatagtgtctcacaggattctctgcatttcctggatttaaatggtgacttctctagcaagatttgggaaatttttgtgggcagtatcctcaaatatgttttccaacttgcttgttcttcctccctttctttgagtgatgccttgagtcatatgtttggtctctttacataatctcatatttctcagaggttttgttcattcttttttgttctttattttcatctgactgagttgattcaaagaagtgatctttgagatctgagattctttcctcagcttggtccgttctgctgttagtacttgttattgtattatgaaattcttgaggtgcatttttcagctctatcactttagtttggttatttcttaaaatgcctgtttcatctttaagctcttatgtcatcttattggattccttagattatttggattggattttgactttcttctgaatctcaatgatctttgtttctatccagattctgaattctatgtctgtcatttaatcctggttaacaaccattgttggagagttagtatgattgcttgaagacaggaagacattctggatttttacattgccagagttc

SEQ ID NO: 407 - DNA, 1327 bp, Homo sapiens
cagggtcccagatgcacaggaggagaagcaggagctgtcgggaagatcagaagccagtcatggatgaccagcgcgaccttatctccaacaatgagcaactgcccatgctgggccggcgccctggggccccggagagcaagtgcagccgcggagccctgtacacaggcttttccatcctggtgactctgctcctcgctggccaggccaccaccgcctacttcctgtaccagcagcagggccggctggacaaactgacagtcacctcccagaacctgcagctggagaacctgcgcatgaagcttcccaagcctcccaagcctgtgagcaagatgcgcatggccaccccgctgctgatgcaggcgctgcccatgggagccctgccccaggggcccatgcagaatgccaccaagtatggcaacatgacagaggaccatgtgatgcacctgctccagaatgctgaccccctgaaggtgtacccgccactgaaggggagcttcccggagaacctgagacaccttaagaacaccatggagaccatagactggaaggtctttgagagctggatgcaccattggctcctgtttgaaatgagcaggcactccttggagcaaaagcccactgacgctccaccgaaagagtcactggaactggaggacccgtcttctgggctgggtgtgaccaagcaggatctgggcccagtccccatgtgagagcagcagaggcggtcttcaacatcctgccagccccacacagctacagctttcttgctcccttcagcccccagcccctcccccatctcccaccctgtacctcatcccatgagaccctggtgcctggctctttcgtcacccttggacaagacaaaccaagtcggaacagcagataacaatgcagcaaggccctgctgcccaatctccatctgtcaacaggggcgtgaggtcccaggaagtggccaaaagctagacagatccccgttcctgacatcacagcagcctccaacacaaggctccaagacctaggctcatggacgagatgggaaggcacagggagaagggataaccctacacccagaccccaggctggacatgctgactgtcctctcccctccagcctttggccttggcttttctagcctatttacctgcaggctgagccactctcttccctttccccagcatcactccccaaggaagagccaatgttttccacccataatcctttctgccgacccctagttccctctgctcagccaagcttgttatcagctttcagggccatggttcacattagaataaaaggtagtaattagaaaaaaaaaaaaaaaaaa

SEQ ID NO: 408 - DNA, 3287 bp, Homo sapiens
cctcctcctctttctcctgagaaacttcgccccagcggtgcggagcgccgctgcgcagccggggagggacgcaggcaggcggcgggcagcgggaggcggcagcccggtgcggtccccgcggctctcggcggagccccgcgcccgccgcgccatggcccgaagaccccggcacagcatatatagcagtgacgaggatgatgaggactttgagatgtgtgaccatgactatgatgggctgcttcccaagtctggaaagcgtcacttggggaaaacaaggtggacccgggaagaggatgaaaaactgaagaagctggtggaacagaatggaacagatgactggaaagttattgccaattatctcccgaatcgaacagatgtgcagtgccagcaccgatggcagaaagtactaaaccctgagctcatcaagggtccttggaccaaagaagaagatcagagagtgatagagcttgtacagaaatacggtccgaaacgttggtctgttattgccaagcacttaaaggggagaattggaaaacaatgtagggagaggtggcataaccacttgaatccagaagttaagaaaacctcctggacagaagaggaagacagaattatttaccaggcacacaagagactggggaacagatgggcagaaatcgcaaagctactgcctggacgaactgataatgctatcaagaaccactggaattctacaatgcgtcggaaggtcgaacaggaaggttatctgcaggagtcttcaaaagccagccagccagcagtggccacaagcttccagaagaacagtcatttgatgggttttgctcaggctccgcctacagctcaactccctgccactggccagcccactgttaacaacgactattcctattaccacatttctgaagcacaaaatgtctccagtcatgttccataccctgtagcgttacatgtaaatatagtcaatgtccctcagccagctgccgcagccattcagagacactataatgatgaagaccctgagaaggaaaagcgaataaaggaattagaattgctcctaatgtcaaccgagaatgagctaaaaggacagcaggtgctaccaacacagaaccacacatgcagctaccccgggtggcacagcaccaccattgccgaccacaccagacctcatggagacagtgcacctgtttcctgtttgggagaacaccactccactccatctctgccagcggatcctggctccctacctgaagaaagcgcctcgccagcaaggtgcatgatcgtccaccagggcaccattctggataatgttaagaacctcttagaatttgcagaaacactccaatttatagattctttcttaaacacttccagtaaccatgaaaactcagacttggaaatgccttctttaacttccacccccctcattggtcacaaattgactgttacaacaccatttcatagagaccagactgtgaaaactcaaaaggaaaatactgtttttagaaccccagctatcaaaaggtcaatcttagaaagctctccaagaactcctacaccattcaaacatgcacttgcagctcaagaaattaaatacggtcccctgaagatgctacctcagacaccctctcatctagtagaagatctgcaggatgtgatcaaacaggaatctgatgaatctggaattgttgctgagtttcaagaaaatggaccacccttactgaagaaaatcaaacaagaggtggaatctccaactgataaatcaggaaacttcttctgctcacaccactgggaaggggacagtctgaatacccaactgttcacgcagacctcgcctgtggcagatgcaccgaatattcttacaagctccgttttaatggcaccagcatcagaagatgaagacaatgttctcaaagcatttacagtacctaaaaacaggtccctggcgagccccttgcagccttgtagcagtacctgggaacctgcatcctgtggaaagatggaggagcagatgacatcttccagtcaagctcgtaaatacgtgaatgcattctcagcccggacgctggtcatgtgagacatttccagaaaagcattatggttttcagaacacttcaagttgacttgggatatatcattcctcaacatgaaacttttcatgaatgggagaagaacctatttttgttgtggtacaacagttgagagcagcaccaagtgcatttagttgaatgaagtcttcttggatttcacccaactaaaaggatttttaaaaataaataacagtcttacctaaattattaggtaatgaattgtagccagttgttaatatcttaatgcagatttttttaaaaaaaacataaaatgatttatctgtattttaaaggatccaacagatcagtattttttcctgtgatgggttttttgaaatttgacacattaaaaggtactccagtatttcacttttctcgatcactaaacatatgcatatatttttaaaaatcagtaaaagcattactctaagtgtagacttaataccatgtgacatttaatccagattgtaaatgctcatttatggttaatgacattgaaggtacatttattgtaccaaaccattttatgagttttctgttagcttgctttaaaaattattactgtaagaaatagttttataaaaaattatatttttattcagtaatttaattttgtaaatgccaaatgaaaaacgttttttgctgctatggtcttagcctgtagacatgctgctagtatcagaggggcagtagagcttggacagaaagaaaagaaacttggtgttaggtaattgactatgcactagtatttcagactttttaattttatatatatatacattttttttccttctgcaatacatttgaaaacttgtttgggagactctgcattttttattgtggtttttttgttattgttggtttatacaagcatgcgttgcacttcttttttgggagatgtgtgttgttgatgttctatgttttgttttgagtgtagcctgactgttttataatttgggagttctgcatttgatccgcatcccctgtggtttctaagtgtatggtctcagaactgttgcatggatcctgtgtttgcaactggggagacagaaactgtggttgatagccagtcactgccttaagaacatttgatgcaagatggccagcactgaacttttgagatatgacggtgtacttactgccttgtagcaaaataaagatgtgcccttattttaaaaaaaaaaaaaaaaaaaaaaaaaa

SEQ ID NO: 409 - DNA, 2173 bp, Homo sapiens
ctcggatccgggactgccgcagggggtgccacagcagtgcctggcagcgtgggctgggaccttgtcactaaagcagagaagccacttcttctgggcccacgaggcagctgtcccatgctctgctgagcacggtggtgccatgcctctgcaactcctcctgttgctgatcctactgggccctggcaacagcttgcagctgtgggacacctgggcagatgaagccgagaaagccttgggtcccctgcttgcccgggaccggagacaggccaccgaatatgagtacctagattatgatttcctgccagaaacggagcctccagaaatgctgaggaacagcactgacaccactcctctgactgggcctggaacccctgagtctaccactgtggagcctgctgcaaggcgttctactggcctggatgcaggaggggcagtcacagagctgaccacggagctggccaacatggggaacctgtccacggattcagcagctatggagatacagaccactcaaccagcagccacggaggcacagaccactccactggcagccacagaggcacagacaactcgactgacggccacggaggcacagaccactccactggcagccacagaggcacagaccactccaccagcagccacggaagcacagaccactcaacccacaggcctggaggcacagaccactgcaccagcagccatggaggcacagaccactgcaccagcagccatggaagcacagaccactccaccagcagccatggaggcacagaccactcaaaccacagccatggaggcacagaccactgcaccagaagccacggaggcacagaccactcaacccacagccacggaggcacagaccactccactggcagccatggaggccctgtccacagaacccagtgccacagaggccctgtccatggaacctactaccaaaagaggtctgttcatacccttttctgtgtcctctgttactcacaagggcattcccatggcagccagcaatttgtccgtcaactacccagtgggggccccagaccacatctctgtgaagcagtgcctgctggccatcctaatcttggcgctggtggccactatcttcttcgtgtgcactgtggtgctggcggtccgcctctcccgcaagggccacatgtaccccgtgcgtaattactcccccaccgagatggtctgcatctcatccctgttgcctgatgggggtgaggggccctctgccacagccaatgggggcctgtccaaggccaagagcccgggcctgacgccagagcccagggaggaccgtgagggggatgacctcaccctgcacagcttcctcccttagctcactctgccatctgttttggcaagaccccacctccacgggctctcctgggccacccctgagtgcccagaccccattccacagctctgggcttcctcggagacccctggggatggggatcttcagggaaggaactctggccacccaaacaggacaagagcagcctggggccaagcagacgggcaagtggagccacctctttcctccctccgcggatgaagcccagccacatttcagccgaggtccaaggcaggaggccatttacttgagacagattctctcctttttcctgtcccccatcttctctgggtccctctaacatctcccatggctctccccgcttctcctggtcactggagtctcctccccatgtacccaaggaagatggagctcccccatcccacacgcactgcactgccattgtcttttggttgccatggtcaccaaacaggaagtggacattctaagggaggagtactgaagagtgacggacttctgaggctgtttcctgctgctcctctgacttggggcagcttgggtcttcttgggcacctctctgggaaaacccagggtgaggttcagcctgtgagggctgggatgggtttcgtgggcccaagggcagacctttctttgggactgtgtggaccaaggagcttccatctagtgacaagtgacccccagctatcgcctcttgccttcccctgtggccactttccagggtggactctgtcttgttcactgcagtatcccaactgcaggtccagtgcaggcaataaatatgtgatggacaaaaaaaaaaaaaaaaaaaaaaaaaaaaaaaaaaaa

SEQ ID NO: 410 - DNA, 23990 bp, Homo sapiens
catggtccttctgcttcttctttaaaatacccactttctccccatcgccaagcgaggtttggcaatatcagatatccactctatttatttttacctaaggaaaaactccagctcccttcccactcccagctgccttgccacccctcccagccctctgcttgccctccacctggcctgctgggagtcagagcccagcaaaacctgtttagacacatggacaagaatcccagcgctacaaggcacacagtccgcttcttcgtcctcagggttgccagcgcttcctggaagtcctgaagctctcgcagtgcagtgagttcatgcaccttcttgccaagcctcagtctttgggatctggggaggccgcctggttttcctccctccttctgcacgtctgctggggtctcttcctctccaggccttgccgtccccctggcctctcttcccagctcacacatgaagatgcacttgcaaagggctctggtggtcctggccctgctgaactttgccacggtcagcctctctctgtccacttgcaccaccttggacttcggccacatcaagaagaagagggtggaagccattaggggacagatcttgagcaagctcaggctcaccagcccccctgagccaacggtgatgacccacgtcccctatcaggtcctggccctttacaacagcacccgggagctgctggaggagatgcatggggagagggaggaaggctgcacccaggaaaacaccgagtcggaatactatgccaaagaaatccataaattcgacatgatccaggggctggcggagcacagtaagtccaaattctcgctggggtgtctgctctggagggtctgaactggagctgggagctctgcagaggggggcctagtgctggccacacagcagggtgccccaggattcaccagcaccaaggctcaggatgtgcgatgctcctccgttggggctggggaggtgggtggggaaggagatagagccattctgttaagagccggcgcttctgggaggccaggagccctggagctgagtggcttgctgaattcacatcacatccttgactgattttaatttggaattacattgtgctgtccagggaaacatatgtattcttgcacatgcgatcgtatcagtaactgtaagcatctgggtgccataaaggggaaggccggctctgtcaggagcccttacggttctcagtgtggagacctcatcttctccctgcttttcacaactcattgtgacacgtctccgtttcagtttttccagttcttgggaagaagaatacctgccccaaattaatgtctgtcaagctttttgaagcccaggcaggagacagcttcttgctgcctgggccctttggtctaccccacccacgtgacccacgagacccacgtgagctgtgtgtgtggaaggaagagggtatgcacgaatgttcccagggccgtgtactttagggtgacatgcagtcttgtgcagtagacagattcatgtgctcaaaatgggcgccctccaggccggtgggcacggggagagcgggttttggctgtggatgcgtagaggaggctggcgccctttgtgtctgcgtgtcacgggagagcgggtggaggggtggcagtgggtgcatggtgggggggggggatatgtctgggagcctgccgtcccaggaggctctgtctgcatggaggagccgggcggcttctgggcgagatgtctgtgtgtgttggtacacgtgtggaagtcatatgtgtttactgaaggggattttaaaaacctcaatacaagagagagaaatttggcagatgttgagaaactgacagcccaggaaagaggaatgtgagccactcgtgggccgtagactccgggagcagctctgtttgcttttcctaccagcaggtgtcctcgccgccctgactacctcagcccaggcccacctgggaggtgggcagctcctggagtggggtggagggcatgggatggagctggcaggcaggggagggtggtcagcagagcacacagcaaggggtgaaaggaacctggctggagagaaggaacaggagtgggtaccgatgggtggaccagctctggctggaggtgcaaaggccccgttcacggctccacgccaggcagaggagcctgtggttactggcgaggggttcccgctccagcttcctgtggctgcctggagcgcctttcttcaggatgtggctgccatgtggggcggaggctggaggccgatgcagagctactactccctgcccagggtctctgggtggggctggctcagagacccacagttcccagaggcacctagcagctcgatggccaaggctccaactccctgggaacccaccaacgcgggagatagtgaccacaagcatcagaggaaggtcgaaatctgaggccggcaggagaggtgtgaggagagtccagggcaagagggcaggactcagaccttcatggtctgggtcagcaggaggagtccaagggaggaagcattctgagtcaccaggacccccccatcccggaatcctgagctgagaatgaatgagccacgtggaggcaaggccatgcaggtgcaagtggacactgattttgtgcagactcaaagcacaaatagcagatgtccttgggaaaagcccgggcagggccccatagatgctgggcagcttccaggctgcagtaccaagaccttacaactgcaacagatgggtggatgtggggttatggagcaatggtctggcctggggcaacccagcacagtgagcaggatgctgttcaggatgctggggaggagccaacgtgcgatgctatgaggctcacaggtacaaaccggaagcaggcagactctgcagctgttggaggtgacttggaggctgagcagacggacctgggcccgccctgcagctggtcaggtgctgagcccaccccagagaggcagacacacaaggcacactaactataaagaaggcagtgggcaggtgctgagcaggagcagagagccatcatcaggggcttgcaaggcggcggggcggggtgggggaaggaagcctgtctttaactcatgagggcagacaggggtgacaccaggtctgtggtggggcacagcagggtctcaatgccagagcctctgctgggaggtcatgagatcacgttctgttccatatttcctcacttctggccacttccctgacccagtgaacatgcattcgaaggaaagtgacagtaggagccagggcaaggagatagaggtccctggagaggaaaatgaaagaggaaatactttttagtagtgcaggagaaagggcaccaaggtgagagcagagaggaaggccttttcctaaataaccttttctccctgttttacagataaggaaactgagacctggattgcttaagtaatttgtccaaaaagagcagggaccctaacctagacattctgtgtgcaggacgcatgtagttaagcactcatttatatgtaaaatacacgttgtaagtgttacctttaacctcctttaacctttagggttcagtagaactttgatttataacataaatgaatcatgtgttggaccaagcaggagaggtcagagttattatcttagtaacccaggtggcagattgcacaatgataactggatttgttcttccttagctctgcatttttttttttttttttttgcccgggagattcatactgccacaaatgttctccctaatttaatgaaggagttttctttatttaatgaagagtctcaagcaggttaagcaaccgcagctacgtaaaagtgacctctctgagcctcagtttccccagctgtaaagttagagatgatttccaaactccttttcagctgaaagaattttataattccatctgggatgaatcagcagagcctctattggggagtatgggcaagactctgtaatcctttttctaattctccaggattttactgtcgggagggagtagagagtttctctgaccccatgtgatgggaaaggacacagcttttttacttccgttgtcatccctcttacaaaggtatcaccaatgtaggtgtcattttatcttctggcttgtaattatctgtctctgtttggagacttgttgttttcagccaagggcagcgctaagacaaccagcaaacccagagtttctcagcaaagagaaaactctatattttagtctttgttctctagctgctaagtgtagattttgtttattctgagaattattctgaaaatcatttgctccaagggccaatgccctctgcacagtagaggtcagcacttctccaagtgtggtccagaggaagctggaggtaaatgtagattccctggtcccacccacccttatagaatcagaatcttgagggggtggagtcttggggaacctgtattttcgacaagctccttatggattcttaagcacattgaagcttaagagtcagtgaactagggcgaaacttttcttagagggatggcaaacacaagtgcctacagagacccggcaggaaatgcaaatgatctggaagaaaagccacggcgtcatgataaactgcaccaggacacttggtcttggggtcaagaagaaagtagggtgtgtgagacagggagagggaggggacctggagcccacgtgcccagccaaagcagcagccagcctcagttcttgctgggttttgcattgaggactgtgggtccagcttgattagttcttcccgtgtcccagaaaagcagaaaatctggatctttctgtgaagtgttccaatttttaacatgggcttaaaatgtttatgggcttctaactcaaaatttttaaaggtgttccatcagcgaaacaacatgtctaattcatttaacggttaatcaatagaaagctcacaccattaaagcagtggtttctcaaacttccagaacatctagaagccatggtgccctttgcaacacattataatctgtggttctcaaccctggctgcacgttagaatcatctggagatcttgaaaaaaatatgccgtggaccccactcactccagtgtagtcagaactgctggggaatgggtccaggaatcatttgtttttaaagctttccaggtgattctaatgtgcagccagggtagagaagtacagccacactgataaatatagtcccttcactagaaccagcagaaatgatatatacaagcaaaggcacacctagccacccaggtgtctgaacacattttaaaaggcagttaactaaacatggtcagctatttcctggtttttccatgcatactgtacatgaatattctttgcttatgttttgccccgttaaacaaaatagagaaaatggcattcaccaatatatattttttctgtgcaatggaaaaagttgctcaagatttaatttgtaaaggtgggaccccctagtccagctctcaataatactagtgttctgtgaggcatggcttaagaaccacaaactcgtttgcagtgggtcattgtctgaggcataggttgacactctaggcccatttagtggaatcttgccatattttgttgatgaaaccatcttcaccagatgatctcccagatccctcccagcttgaagagtctctgcttcaataaatgaggtatgttcagaagacctgggttcaaaccccacctccaccaccttctagttatgtgaccttgggaaagacatttaactttttgaggctcagttttctcatttgtcaagtgataaattttacatgttttcattcttctcaggggttgttagaaggtcacatgaagtaataaaaactcgacaaaacaaggtggtgctattacattttgcttatttatgtatacgatgattcattccacagattacttaaaacatcattattcagtgaatttgattgtcaagaagattgtatgtacattttctttgatctcccaggcaattcttttttttaattaattttaattttaattttaatttttttgacagagtctcactctgtcacccagcctggagtgcactggtgcaatctcggctcactgtagcttctgccttctgggttcaagtgattctcatgcctcagcctcccgagtagctggggttacaggtgcccaccaccacacccagcaaatttttgtatttggagtagagatggggttttgccatgttggccaggctggtctcgaactcctgacctccagtgatccacctgcctcggcctcccgaagtgctgggattacaggcatgagccactgttctcggcctttaaaatttttaattttaaataatagggataggtcctccctatgttgtccaggctgatcttgaactcctgggctcaagcaatcctcccgcctcagcctcccgagtagctgaaataacagacatgtgctaccatgcccagctaattttcgtattttttatagagatggggtttcaccatgttggccaggctggtctcaaacacctgagctcaagcaatccacccacctcagcctcccaaggtgctggctgggattacaggcgtgagccaccatgcctggctgccaattcttcttcttcttcttctttttttttttttttttgagatggagtctcactctgttgcccaggctggagtgcagtgacacaatctcagctcactgcaacctcgacctcccaggttcaagtgactctcctgcctcagcctcctgaatagctaggattacaagcatgcaccatcatgcctggctaatttttgtatttttagtagagacggggtttcaccttgttgcccaggtgccaattcttttttaatcactagcaattgtgtcctaagctttgcttgctagtgtcaagttgcttgtgtcagctaacttctgagtgactctggccaagaccctctagacagccatttcttcctctgaagagggttgcgccacatgactcctgatgtcccttctaatcatgggaaatctatatatcccagtaatagaaaaatgacctttcccacctctttcttgaaaccttaaaattctccccaggatgtgttcatcctggggagcagattatgattgataggctggaagaaaccaaagaggacggccactagggtgtcctgagaactctcttagctcataactttccccatctcctggcttcccactgccttgacccactctgactgtctcaccagcaagtgccattttccatctcccttcttttttttctgagatggagtctcactctgttgcccaggttggagtgcaatggcaccacctcagctcattgcaacctctgcctcctgggttcaagcgattctcctgcctcaacctcctcagtagctgggattacaggcacgcaccaccaggcctggctaattttcatatttttagtagagacagggtttcaccatgttggtcaggctggtctcaaactcctgatgtcgtgatctgcccacctcggcttcccgaagtgctgggattacaggcgtgagccaccgtgcccggccccatctcccttctttttacagcaaggtgcatgttgcactgacttaccctttattcctcttgtagtcactggagctgtgttatttatttactttattaatttatttatttacttgaaacagagtctccctctgttgcccaggctggagtgcagtggcacaatcctggctcactgcaatctggacctcccgagctcaagtgatcctcccaggaggtgctattgtaactgaagccatatcaataacagctccttcaaaacccagctctgttgtccttgatagggttgccaatgcaagtagcttatccacattcagagtattacaaacttgtaaacttacacattacttaactatcactgatttctctccttggttctatctgaaatggtttagggaatcgttggcagtatctgttctttcaaagccaattattaatcagggcttcattagacagcattcacacatttgttttcctaacatctgttccattaattttctaagaaccagcgtcaggcccaccagatggcaatttccagaaacactcactcatcctttcctgaagatcagtagcacatttgcttgtttccaggcctctgatccttcctgccttgtctgtgacttcctcaacaacccctcggggtgattataagctcattccagccatgtccattatgtgtggaatctgggtctatgagcttgaatttcaacttcgggctattgttaccatttgtgcagaaagtttttctctgggtgttaatactgctcagaccttgaggctgtcaagtgtacaggagcagagaaaagacaggctctttctctttctctggctcagaggggtgggaaagagcattcgctgcccagatcttgtggacagggatgaagaggccagcaggtgacagcgtctggcatagcacgtgctgtcaaggaaagagaaaggagccaatggtgacacaccagcttggtcagaggaagcatctgtgtttctgccaggctcatgatgtgggctctttgctatataagccctgctttattgggtctaaaacacaaggttgagatgtcactgcactgctcaaacactttcagtgactccctactgttaatgggttaaaatttaaccttttagtctgacaggtggaccccaatctatcatcttgccctttctcacctggctcccacctgctgtttcgggccgctcttactcatttgcatttcctcccctccctgcctttgcttccagcagtcactccatgtaacatttctttcctccccatcctcaaatcctctcaattttcaccccttccgtgaagtgctccttgccatttccctcctttgatttcctgcagcaactcctggacttctctgaaaaccactggtttcctgtcgctcccctcacctgtgctcctgcattgtgacatcttccggggcactctgtcctattatttctctctagtcctgttatttgggcccatgtattaatacccccccttagatattaacccataagcctgaggctgcacttttttgaattttgaaatcagaccttggccttgaccttgagcagcaggatataaataactcttacatgcttagcgttccaataatggaacaccaggcataaatgggttttaatccccttgaaggcaggggttgtgtctactcatgttttgcttcccaaggttagcactatgcttggcatatagtagctgctcaatacatctttgataaatgaatgaatgcccagatgaacaaacacacgaataaatcaactagctgtaagatatgtaaactactaggtgctgatatctttctagaatcagtattttctcaaaaagtaggaaaaacgggttggaaaacttaccagaactgagatgtcaaggcagtgggaggagggggcaattagatttgactggccagtctagtgccatgttgtggagctctgaggccacactgctccttgctcaggactgtgtgtgattctagggccaccaagaatcttcctcgtatctccaccttgcggtctgaggcctcaagcctctagggaggtggcaggcgggacggtggccacttggtgcctgtccgttggcagcacactgttcctgcatgtctcgctcatgctgtgccctctgctctgctttatctcctagacgaactggctgtctgccctaaaggaattacctccaaggttttccgcttcaatgtgtcctcagtggagaaaaatagaaccaacctattccgagcagaattccgggtcttgcgggtgcccaaccccagctctaagcggaatgagcagaggatcgagctcttccaggtaactcctctctcagagcagaaaccacaccgacgggaaagctggttcctttgccatatcagggcaccactgggtgcagcgtttggcagacctgggtttgaatcctggcttctctgagccttcgtttccgtatctgtgtctgtcattaaaacacttaagagttagctaaggtgctcgagggccatggcattcaggaaccactggtttcctatcgctccctcacctgtgctctgcattgtgacatcttctggggcactctgtcctggtctcgggtactcactcctttctctgccctgtagatccttcggccagatgagcacattgccaaacagcgctatatcggtggcaagaatctgcccacacggggcactgccgagtggctgtcctttgatgtcactgacactgtgcgtgagtggctgttgagaagaggtaggtggacccttcagataagcatttcagaatgaacctcaggtcccttagtcctccatgaaatggagggaagaggacagaattaagggagtcagagatctgggttcaaaccctagctttgccactgagtatcctccattcattcactcaactaatgtttattaaatgctcactgtaagacaggccctggggatgcagccacagggataggaactatgagaaatagaaagagggcaatgtgacaatgagtgggtggagtccaacagggaaggtctctatgatgaagaaattcatgcattgacatctgaatgataaggatttagcccatgaagatcagaataagggatgtgctaagcaaaggcaacagggaggcccaggccctcaagtggaaataagcttgatttgttctagcagcagcagcaaacagatcggtgtggctggagcatggtgagctggggaggggaagaggaggggaggtggtcagggaggttgctggggccatataatttattattactattattattattattattattattattattattattattattatttcttgagactgagtctcgctctgttgcctaagctggagtgcagtggtgcgatctctgctcactgcacctccaccatctgggttcaagcgattctcacgtctcagtctcctgaatagctgggactacaggtgcacgctgccacacctggctaatttttttgtatttttagtaaagatggggtttcaccatgttggccaggctggtctcgaactcctgacctcaagtgatccgcccactttggcttccaaaagtgctgggattatagatgtgagccaccatgcccagccaatttaatttagaacatcatcaggtcatggcgaggtttcaggacttattccaggtgtgatgagaagtgtgggagtgctataaccagagctggggatactcaagatacccaggaattccttcctgtccctctactgggtgtgaagtcaagagcctaggagaacccacgtggatctgccaacagcagctctgttgggaattctgactcagacagctacagggaggaggggctgggtgaggtgatttgattgacatctttaaaagatccctctagtttccaggaggtcaagggaagaggcaggaaaatgagttaggagccacggcggcagcccagatgagagcaatatctaggccgagactagggcggtagcagtggatatgacgatcagatggatttgttctgtattttgaaggtagccagtagcacaggctgattaggtatgggatgtgaggacacaagagcattccagataacttctaaattttttcgacatccaggtggtatcacttattgaaatagggggcctaggagaagaacaggttctgttctgcccagttaagtttaaaaggccgggtcgtcatgcaagtagagctatcctggaggcatatcaaacttcacatgtcccaaatatcttacccacacactgccttcacctggaaaatcaggcaatggttcctcctctatgtatgcctcacagagctgttttaaggatcaaatgtatttgagagaacttcatggtttttaccatgttttacaagagtaagcttttcttattttagataaggaaacaggccgagagaagttaagtgacttgaccgaggtcgtccagtctggattagaactttggtgtctcatgacaccatcctctgtgtttctttcccttttcttggctggtactgcctggtctgatgctcagtgggttggggtcacagatggcagtcccatctgttccttctcttcctcttgggcaaggttttctcctgtcatcagctgctataaagccacagaccatccacatattgatgcccagagtccctgaggcaggtggatccttctaagtccttggtgttttaggcaactaagagttaaagctcaaaggcagagcttacaaactatttggcctgcacattgttttcgatttgactagtcatcaacagttttgggtgttttaagtcaggagatttcacataaaacctggacttcttgctgtttttgaaaaatcgaaagatttcctgataaccatccgtcagagatgagtaccggccaccccttgagatggggtatgcatcctcagtccccgcagcccccaccattccctattgttccccaagagtgaggctggcagttcctgtttagcatcatgtgctggctcgattttctcacttacgtgacctgcctgggctcggtagccatcgagtttgcattgcttgatgccacggagcccaggcaagtcacataaatgagaaaattccccatccaaggggaattatccagtggctgagttggcagatggtgggctgaagatcctgccccagtcccaagggtacccaggaatttcatcctgtccctcctactgagcatgaaggcaagagcctaggagaacccacgtggatctgccgacagcagctctgttgggaattctgactcagacggctacagaaaggaggggctggggaaattaatctcttaacttccctgtctgattttgatcagctccacctggatttctttgaagccctgggcacttgaaggagttcttattttcacagctgcagaactcaatgagaagtttgcattgagaatgatttccatcctcctgagacatcaaaaagataatttcgtaataaaacctatgggtcccccacccaccacccccacagctgccaattctgaggttagttcttcattggaaccttcagttcacacttaggcagatactgcccacctttcccacaggggaatcatcacacaggtttgtacttacagagagcccatgagtctcttcagagttcatggcttcaaaccaggcaacaaaggactccaaattggagcagttggcggtgtagattgatgagaaaactgagtcacacatgtggtcttggattcattcagcaaacatctgagagcccttgtgcaccaggtacccaggctgcattctgggtcgcagagtgggttggagtccacaagggccgctggggacccaggtctcatacccttgtgctattgctcatatagtctgcagcacctagctaggcagggccaggcctcccctagtaggctggggagggagcctctcagcatcatggctcaggaaaggtgggacactgggaaacaaccatcttgcatgttggtgaatgtgtgggcatcttccttggtggtctctgttgccccctctttacccctccttgtctctaacaagagtttgggatctggcatcaagctgtcagtgcttgaatcctggcactactatccactggttggatatcttgggcaagctgtttaatctccctaagcctcagtgttcttatctgtacaatgggggataatagttcttgctctatgggattattatagagatagaataagttagtgattgttgtcatcatctctaagtcctctatctggatacagcctgttggccaagccaggccaccctcttgtgcttacatcctggaccctcactctccccaacacagctgtctgcaccttgactttctaactcacagaatcatggaactcactcactccaggtctcttccagcctgccttgaaccagcttgaccaggaggtacactgtgttgttaggtagcccatttcagctactttggctcctccttccagctgccttaacccagggagagggcaatcctcatacctccctctccattcacttctcctccagctgggtctcagctgccttgttttattggtctgccttccctcactgagcgaacctgctggaacagagatcttcaagctcagcaggcgcagtgtgcctcagaggttgccctgacttagggtagagcagatctggttaggctctggagtttatggaagaaaggagctgggttttaaccagtaggactgggatgtccaagccaacctaatgttgatgggaatctccagtcttgtaggcttgtatccttctgtctatgagaaggttgctgggccaggttggactttttggggtttgccctgatggcacaatttcaggaagactccaggttgtctccaaggccagatgctcacacacatggtgtgtggcctcagggagcagcaaatcaatcaactcatcgagaggctgaccctgaatccagagaggtccatcccccatgacctctcctacacctggccacaactggctgctatcccaggatcaacagagcttcccaaattaagtcttacccaccagaattgacatgataccagatcctacctggttttctgtgtaaaactacttgtctcagtgcagacttttcattttctttctttttccttcacttcactcaacctcatttactgagttcctgcttccttgattttggttgccaaaacatgtgatcccacaactactaggcgaatgggctggagttgcccttcacgcaccagaatgtcaggcaccaaaccctggcacctccaggcttcatcatgctcactgtctccgtgctcaagtcatctggaccctcagccatagttctctatcatctcctctgtgctgttttctaagttcacaactgtcttcccaagctgttcatcttggtgagcaatccacattccaacttcccatcatggtgaacaaggattcccaaagaagaaatgtccaagtaatttttacctcgttgtgtccttgttccttaggaaaaatatggcccagtgtaaccgtgatcttcatcttatctcttctagaatctgccactttgtctaggcccacagtcatggccctggtagaaatgcttgcatcttccactgagacggattctgcttcctgtttgcaagtgaccttgcctctagcattggttcctgacttgaatctttttgccagcattacatcctgtggctttttgaatttgtggccttttgaatcacagtctctgtgctcggagactctttagttactccctgtccgtagtctcttccagtccctctgcctcttgccctgatccttctgcagtagattggctcaacgatcccctctcccaaaaaccatgtagatggcatgagtttttgctttccttactgtatctgtgtacttttgcctccaagtaggtaggtgacaattttctcttaataccatcctttcaaagggaatgattattccacttctgtttcatgatggccactagtgtatgcccccatttggtgattcataatacaacaggaatacctggaatgtggcaacgtgcgcttgaaggtccactctgagctctggaggcactttctgtctcctgtgaccctcaatagaactcagttcctatgagtccctgtaggagcagaggccctggctcacccttgcatgggtggtgggcacacttccccatcacacagaggtgcttttctcactaattctgtcttattttgcagagtccaacttaggtctagaaatcagcattcactgtccatgtcacacctttcagcccaatggagatatcctggaaaacattcacgaggtgatggaaatcaaattcaaaggtaacaaaatgaatgtgtatggtaggatgggtgagtgggggggaagttaatgggacaggatagtgcaggagacccttaccagacctcaagaaaagaaaccaagctccttcagagagatagccgactattttgtacttgagtaattctgctttgccccaaaagcaatgagtgtaactttcagtttatagcttagagaatgcattagcctctggaagacaacacgtactggtaagtggtgaaactgtgtaggcaagccgtctagcctctggtcctagtgaaatgggatgagagttcctctttcacagtgttgtcaggcaattaaatgagataatgaataaggaacacagtgccagaaatgctcaacagataggacttgtcttcctcctccctaaaagaaattaagtttggctgtcctgaacatgagtgcccagacaactgagctttccagatgtgcagggcctacctgaccttgcccaggggtcctctgggtttggatgattgcttcgagcctcagggtgtttgtccccggggtgtttgggtagagatggcgaagtcgttgagagtcatttctggttttccattatgtttgcaaggaactcagccttgatgatctctggagttcagggaagttctcttttcctttcatattcccattttgggtaactgcggaacgcctgaggtcagaggcttgtctgggaaaaggtgcaggcctcttttggctcagcgctggacagtgatcttaccccacatgggctctattttacagccttttcttaaagccaaagatttgacactgtaaccacagaaccttagagcccagaggacctttggagtccttacctacaggccagcttaggatgaaaccttcccatttcagtgaatacttatcttgttcataaagattttcagaaaaagggatttgtgatccaggtctctcatttatcttacagatctggtgccccttcctgagacccgagccactcctgtagctatgtaaattaattcctcatgttcctgtcctcagtgaggatggacaacagttggcagctgtccttcgcaaaatcgatctccatttagttgagactctttctaagtcagtctccagtcttttccttttttttcagatgaaacgggttgatgaatttagattttctttccagagcttatttgctatttatcatatgcttcattatctcatctgaattttatagtgaaaacacttcaaagactctaagtgcaatgtgaatgttaacaattatacagtcttgtttctttggctcccattcaggctatcttaagttgtgacaccttaaatttttggtaggacttctgcgttatcttggtccattcacattttaagaggaaactcacaccccaagattctaagtctagaatctaaagtgacaatccagggctgggtgcagtggctcacacctgtaatcttagcactctgggaggccgaggtgggcggatcacttgaggtcaggagttcgagaccagcctggccaacatggtgaaaccctgtctctactaaaaatacaaaaatagctgggcatggtggcatgcacctgtaatcccagctacttgggaggctgaggcaggagaatctcttgaaccccggaggcagaggttgcagtgagccaagatggggccactgcactccagcctggccaacagagcgagactctgtctcaaaacaaacaaacaaacaaataaacaagccgacaacccggagatatgtgttaggtacccacttagtaacagggatgcttcataggtccatgaagattcctaggaatctcagcaagggctttctgccccttggaagatttctatacaagggtatggggatctgaacacggggcatctttcagtgggcatccttacaataataatgagttcttttgatactggcttctccatctgctcttcccctttctgcacctggacatcagaattaagctgcacttgtcccccacacctccctcgcagactgcactgcccctcctcctgggcagtgatggggcgtgtggaggaggcagcctccaagggctctgctctcttcagacaggagattgtcactttccttcccttcttcaggcgtggacaatgaggatgaccatggccgtggagatctggggcgcctcaagaagcagaaggatcaccacaaccctcatctaatcctcatgatgattcccccacaccggctcgacaacccgggccaggggggtcagaggaagaagcgggctttggacaccaattactgcttccggtgagactgggcccacatgggaaccaacatctactgcctgcctactgcccaatggctaggtcaggccccagagccaagccacactcaacagagggtccctgatactattcacaaacatctccaggaagaagactgaaaatctctcacagagattttctctgtgaaatctctttctgttttcctgggagtcccactgtttttccataggctaactctggaaggagctggctgaagtaaatgaggaaaactctgtgaggaggagtgttgctaaaatagtttggattggagatgcttggtcaaagcctctccatgatttccatgttttaagcacttgtagagtgtatgtgtgagattaatgtaggagtttccattaaagaagtgctcagttagttccctatgaagggtccaaggatgctactggatggaggcaaatagaatggtctccatttgaacggaaagttggagctagagaaattaacaaatgaattcagaaattactgggtagccacaatagagagatagaaaagacccagcttctcttactcaggagcagtttcactgctcatttataaagggaggataaagtatgcatgccaactactaaaagggagaagatgatcacccccatgagagggtccgaaggattaagtgctttaactgggagcaatgagttcacctatggacacaggaaaggcttcagaagggtgtggaatttgagcagaggcttcaaggatgaggtttggggatgaagggatccaggaggggaagcactgcaggtaaaggaaggagcatgagtgagtgagtccatctggcctcagaggatgccgaaatgaagctggggagaacgaattgggaaatatttagatctggaaaccatgtcttatgaggatggttgggcttgggaaactagggatgttcagttgggggaacagctcaacagcaaggtataggagaggcaaggtagttgccacaaaggctggcatgtagatttatttattccatcagttaggaacaaatcagttaggaacgaatcagttatcagttaggaacgaatcagttaggaacgaatgatcttggccagtgactttaatcatagtgatttcttgttcacaagaggcctgtagcagcagggttagggtgggctggctgcttaatgatgccaccgaagactcaggctttctctctttccagtctgccatgcttagtatgttggcttttcatccttttccttatggtcacaagtgattgctagggcttcaggcaccttgtccacatttaagacaagaaggaatgagggaaggggaagagccagaagctttcttcttccatctgtcacttttataaataatcgaatatctttgccagaacttgcccttaccccctgcatacttctccttgtctgatgggtcattactgggtcacatgaccaccgctactctcaagggaggacaggaaaaggagcatctggtgttttcgactctgtaatgggatgtcacaagggagaagggagttaggaatggttattgaatagataaccaatggtgtctgccatggttcacccttggaacccacaagaagccagattttggctaatagctgcctttggaagtagcaagttctaagtctcagcagatattaaagcagaggctagctgtccacttggcaagcggtattattgccaaatgatctctgtaggcaacagaattgaaggggcctgataatcacatttgggtgatctgttgaaccacggttctaatagaaggatatgccttatttggctaaatggcctttggattgagtctcagcagtcacctactatagtagtcaagctgcataaacttagaattgatttctgtctgggtgcacattaggagggtataaataaaaccaacctcaacaaagctgagttggctaataacattcagtgcttggttttatgtggagcgcttcatagcactgctttgtattgtgatagaaaagggtgcagggccacctttgcctctttactcttcctcatgcagcatttatctctgtttcttacatccttgggatcctggtctttaacacatgaatgtgcctttctggtttcttctgccccatgcccttgaacctgggattccattgatcagagccacctatgatggcatgaaaggactccaagggagaatatgagagcattcatgaagtttcttttattggtggttttaagttgattttctataaatgttttttgttgtagcaacttggaggagaactgctgtgtgcgccccctctacattgacttccgacaggatctgggctggaagtgggtccatgaacctaagggctactatgccaacttctgctcaggcccttgcccatacctccgcagtgcagacacaacccacagcacggtatggagcaggctcatgccatctgaggcactggggctgaccgaccagaccacttgttaaaaagaatgagtgaaggattgaatgttgagtgagcaaatgatggtctggggtgagtaaaattcctctggtgaaggttctgatcttggcaccctgactcagttctactcagtcacattctgcccttttaaattcctaccatagtttcaaccagctttttaatttgctttgtccaaagctctctgtaccgtagaaattaattaactgccacgtgttaccctatgtcagagatatgtgcatgtggctggcaaggaacactgaagtagaaaggcttctatcagaactctgatcattccagcctctcgaatgtagaaaacttactctgaaagacaacaacaaggatggacaagaagctaatttgaaatgctaggaacagaaagtgagatagccgagagtccacaacccctgaaactagtctgtctttcccttgaggggaatcaaaaatagggcagtaatttgtgaagcatgtttccttctagctcattatttctgcatcctgtctggggccctgcacgctgcacttactaaatggctcaaggcaatgttttgtgagaacatttctcaccgaagtgatcagttccagctaggaagagcaatgtaagtgttttcttaaaagccaagataggccgggcacggtggctcacgcctgtaatcccagcactctgggaggccaaggcgggtggatcacaaggtcaggagttcgagaccagcctggccaacatggtgaaaccctgtctctaccaaaaatgtaaaaaattagccgggtgtggtggcacgcgcttgtaatcccagctacttgggaggctgaggcaggagaatcgcttgaacccaggaggcggaagttgcagtgagccaagattgcaccactgcacttcagcctgggtgaaagagtgagactctgactcaaaaaaaaaaaaaaaaaaaaaaaaaaaaagccaagataattcgttatcagtgtagtaactgtcatatgcttcaactcatcaccccaaacaagtgcagttgttctgcttctgtcattgtggatgaacagcaactacacaactactcactcacccaaaccaggttccaacagtttttttttttttcttttttttgagacagactcactctgtggctcaggctggagtgcggtggcactatttctgcttactgcaacctctgcttcctggattcaggtgatcctcccacctcagcctcccaagtagctgggattacaggcgcctgccaccacagccagctaatttttttgtatttttagtagagatggggtttcaccatgctggccaggctggtctcaaactcctgacctgaagtgatctgcctgcctctgcctcccaagtcctgggactacagctgtgagccactgcacccggcccccaacagttcctcttaaagagcacccgtggccattctagcacttgctcagcttctgggactgcccctggaactgggcgacttcctgggttccaggcctgagacttggccttccaacctctcactgacatgtcccttcccaggtgctgggactgtacaacactctgaaccctgaagcatctgcctcgccttgctgcgtgccccaggacctggagcccctgaccatcctgtactatgttgggaggacccccaaagtggagcagctctccaacatggtggtgaagtcttgtaaatgtagctgagaccccacgtgcgacagagagaggggagagagaaccaccactgcctgactgcccgctcctcgggaaacacacaagcaacaaacctcactgagaggcctggagcccacaaccttcggctccgggcaaatggctgagatggaggtttccttttggaacatttctttcttgctggctctgagaatcacggtggtaaagaaagtgtgggtttggttagaggaaggctgaactcttcagaacacacagactttctgtgacgcagacagaggggatggggatagaggaaagggatggtaagttgagatgttgtgtggcaatgggatttgggctaccctaaagggagaaggaagggcagagaatggctgggtcagggccagactggaagacacttcagatctgaggttggatttgctcattgctgtaccacatctgctctagggaatctggattatgttatacaaggcaagcattttttttttttttttaaagacaggttacgaagacaaagtcccagaattgtatctcatactgtctgggattaagggcaaatctattacttttgcaaactgtcctctacatcaattaacatcgtgggtcactacagggagaaaatccaggtcatgcagttcctggcccatcaactgtattgggccttttggatatgctgaacgcagaagaaagggtggaaatcaaccctctcctgtctgccctctgggtccctcctctcacctctccctcgatcatatttccccttggacacttggttagacgccttccaggtcaggatgcacatttctggattgtggttccatgcagccttggggcattatgggttcttcccccacttcccctccaagaccctgtgttcatttggtgttcctggaagcaggtgctacaacatgtgaggcattcggggaagctgcacatgtgccacacagtgacttggccccagacgcatagactgaggtataaagacaagtatgaatattactctcaaaatctttgtataaataaatatttttggggcatcctggatgatttcatcttctggaatattgtttctagaacagtaaaagccttattctaaggtgtatgtctgactcgataaatatccttcaattacccttaattccatgtccgcatctactaatcagaggtaaccagaatctggggcagagaatctgtcaatcaccaaacacattgcttagcgcaactccccttacacagggggcacaccgtgctgacttccgcctgctaagaagactgcactattgcttgtgcgtctttccttcttgcagagtatattattctcagagacacagaggcagtggctcagattggcagaaagcacatacgaatttgacctccagatacctgtgggcaggatcccctggtgtgaatccttgcatatggaaacatggtttatttactaactataaattaccaacatcactgttttcgaaaatctccccccacccgtatcagttgagaatgagagaaaatgtgtatggcaaatggcctaaaaatatgaggctaattctgttctcaggctaagcctaaaagagctaaccaggaaccccttttcagattgtggccctcttgtcagggatctgggaaccatagctctcttttgagtgaggccgtggatcccactgtggtatggacatccacgtggggcagccgtccacagtgagcgggcacagagcgacaggccatctagcagctcctgagaaacacattcttctagtgagatcactttgcctctagtaaaagaaaagtctatctgaagctaaagtatgcaggctgaaggatgtgtctgatgtgttc

SEQ ID NO: 411 - DNA, 23164 bp, Homo sapiens
agttagaaagctggccagacctatgcttttcaagtgtagggctagggctgagcctgcctctggggtaggtaagcccccctgaatccttgagggaagtagaagacacaaactgctagataaaatgtaagctcagtctaaaagggctacgtgccgcttctcccagctctggggcatccctctcctagaaaactggactgttttacagtgaaaatctcgggggtggtcagctccctgccccgttgttatccttaccacttacagcctttcaagaagttctcaggttgggtgctgaactctgaccaggaaccactgagaaatcgaggcagctgggagaagctgtagttccaagcgctgaaaggaagatgggggacaataaacctgggtcgccaagcaaagggggcagaggcctggagaagtgggtctcaggaccagaggacagatcgacctcacacttcatctccccagactccacactccactgccatcaccacttacgtgtctccctcgtcctctgcagcgggttccccagaggtatcttccatggcttttccagaccccaactctggcccgttcgcttcttcttcagaaaggctcccgtttgcttcttctgcaggaaggcttgtattttcagaaagttcttgctcctcgattcgaggactcaactcactaggggaaccaaactctgtttccaggggagtggagagagaaactgggtccccctcccgtagctcctgggacacagctgagccagccacaggatctggggacaaccggggcggatcccccctttcgggaggcggtggcatcagttcagagtccgcatttttattcatcggggaagcgtggggagaaggatgggctggagctgggtcctggtctgaaggacagcagtccggagctaacggttgagtctccaaagtcttcatactgcagaggaagcacagcggagattagcctcagccaggatggcttcgaagttctcagggatccgacgcagagctaaagaaacccacctgtgcttccctcctcttctgggagtaggcagaagactcccgggaggagaggcgaacagcggacgccaattcttttgaaagcactgtgttccttagcaccgcgggtcgctacgggcctcttgctgtcgcgggatttcggtccaccttccgattgggccgccgcatcccggatcagatttcgcgggcgacccacggaacccgcggagccgggacgtgaaaggttagaaggtttcccgttcccatcaagccctagggctcctcgtggctgctgggagttgtagtctgaacgcttctatcttggcgagaagcgcctacgctccccctaccgagtcccgcggtaattcttaaagcacctgcaccgccccccccgccgcctgcagagggcgcagcaggtcttgcacctcttctgcatctcattctccaggcttcagacctgtctccctcattcaaaaaatatttattatcgagctcttacttgctacccagcactgatataggcactcaggaatacaacaatgaataagatagtagaaaaattctatatcctcataaggcttacgtttccatgtactgaaagcaatgaacaaataaatcttatcagagtgataagggttgtgaaggagattaaataagatggtgtgatataaagtatctgggagaaaacgttagggtgtgatattacggaaagccttcctaaaaaatgacattttaactgatgagaagaaaggatccagctgagagcaaacgcaaaagctttcttccttccacccttcatatttgacacaatgcaggattcctccaaaatgatttccaccaattctgccctcacagctctggcttgcagaattttccaccccaaaatgttagtatctacggcaccaggtcggcgagaatcctgactctgcaccctcctccccaactccatttcctttgcttcctccggcaggcggattacttgcccttacttgtcatggcgactgtccagctttgtgccaggagcctcgcaggggttgatgggattggggttttcccctcccatgtgctcaagactggcgctaaaagttttgagcttctcaaaagtctagagccaccgtccagggagcaggtagctgctgggctccggggacactttgcgttcgggctgggagcgtgctttccacgacggtgacacgcttccctggattgggtaagctcctgactgaacttgatgagtcctctctgagtcacgggctctcggctccgtgtattttcagctcgggaaaatcgctggggctgggggtggggcagtggggacttagcgagtttgggggtgagtgggatggaagcttggctagagggatcatcataggagttgcattgttgggagacctgggtgtagatgatggggatgttaggaccatccgaactcaaagttgaacgcctaggcagaggagtggagctttggggaaccttgagccggcctaaagcgtacttctttgcacatccacccggtgctgggcgtagggaatccctgaaataaaagatgcacaaagcattgaggtctgagacttttggatctcgaaacattgagaactcatagctgtatattttagagcccatggcatcctagtgaaaactggggctccattccgaaatgatcatttgggggtgatccggggagcccaagctgctaaggtcccacaacttccggacctttgtccttcctggagcgatctttccaggcagcccccggctccgctagatggagaaaatccaattgaaggctgtcagtcgtggaagtgagaagtgctaaaccaggggtttgcccgccaggccgaggaggaccgtcgcaatctgagaggcccggcagccctgttattgtttggctccacatttacatttctgcctcttgcagcagcatttccggtttctttttgccggagcagctcactattcacccgatgagaggggaggagagagagagaaaatgtcctttaggccggttcctcttacttggcagagggaggctgctattctccgcctgcatttctttttctggattacttagttatggcctttgcaaaggcaggggtatttgttttgatgcaaacctcaatccctccccttctttgaatggtgtgccccaccccgcgggtcgcctgcaacctaggcggacgctaccatggcgtgagacagggagggaaagaagtgtgcagaaggcaagcccggaggtattttcaagaatgagtatatctcatcttcccggaggaaaaaaaaaaagaatgggtacgtctgagaatcaaattttgaaagagtgcaatgatgggtcgtttgataatttgtcggaaaaacaatctacctgttatctagctttgggctaggccattccagttccagacgcaggctgaacgtcgtgaagcggaaggggcgggcccgcaggcgtccgtgtggtcctccgtgcagccctccggcccgagccggttcttcctggtaggaggcggaactcgaattcatttctcccgctgccccatctcttagctcgcggttgtttcattccgcagtttcttcccatgcacctgccgcgtaccggccactttgtgccgtacttacgtcatctttttcctaaatcgaggtggcatttacacacagcgccagtgcacacagcaagtgcacaggaagatgagttttggcccctaaccgctccgtgatgcctaccaagtcacagacccttttcatcgtcccagaaacgtttcatcacgtctcttcccagtcgattcccgaccccacctttattttgatctccataaccattttgcctgttggagaacttcatatagaatggaatcaggctgggcgctgtggctcacgcctgcactttgggaggccgaggcgggcggattacttgaggataggagttccagaccagcgtggccaacgtggtgaatccccgtctctactaaaaaatacaaaaattagctgggcgtggtgggtgcctgtaatcccagctattcgggagggtgaggcaggagaatcgcttgaacccgggaggcagaggttgcagtgagccaagatcgtgccactacactccagcctgggcgacaagaacgaaactccgtctcaaaaacaaaggggggaatcatacattatgtgctcatttttgtcgggcttctgtccttcaatgtactgtctgacattcgttcatgttgtatatatcagtattttgctccttttcatttagtatagtccatcgattgtatatccgtccttttgatggccttttgagttgtttcccatttgcggttatgaaataaagctgctataaacattcttgtacaattctttttgtgatcatatgttttcgtgtttcttggagaaatacttaggaggggaattgcgagtttggaagtaaaaagtagctgtattttgaactttttcagaagctctgagttttccagagcggttgtaccattttacactccaactagcaaggtatgggagttattatggttgtgccacagccttccggacattaggtattgtcagtctttctaatgtggtatatccttgtggttgtaatttacagttctctattgactaaggatgttcagcattttttcatgtgcctattggccattcgtattttgtttgtaaagtagctcttcgagtcttttacctgttattttggttttttgtttgtttttattgttcagttgtgggactgctttatacattctggatacaagtcctttatcagatccatgtgtcgtgaatgttttcttctgatctgttgcttgcctatttgtttgctttacagagtttacagtatcttaagaggagtggatttatcttttttatgttcagtatttgccttgtcctgtttaggacatctttttttttttttttaaccccagggtcatgaagatattatcttacattttcttttaggacctttatggttgtaagttttacagtaaggtccttgagccattaattaattcttaaaattaattgtttatggtgtgaggtgtaggagtcagtctctggtatctttcctgtatggaaatccagttattctgtctccacttgttgaaataggcttcctttctctactgaatgcttttaattttaattattttacagttggagtatagggctaccattttagtgctattttctttttttctttgttaatttttgagacagggactcacactgttgcccaggctagagtacaatggcacaatcaaggcttactgcagcctcgaacccctgggctcaagcagtcctctagcagcctcacgagtagctgggattactccaccacacccagctaactattttatttttttgtattgacaggatctcactatgttgcccaggctggtctcaaactgctggcctcaagctttcatcccatctcggcctcccaaagtgctgggattacaggtgtgagccaccatgcctgacctcttagtgctattttctatttatctcctctgttctctgctctctttaaacgttggaggaagaaacagtacccatcttacacaaactcttcagaaaacagaggaacagactgggcgcggtggctcatacctgtaatctcagcactttggtacgctgaggcaggggatcatttgaggtcgggagttcgagaccagcctggccaacacggcgaaaccccatctctactaaaaatacaaaaagtagctaggcgtggtgacacatacctgtaatgccagttactcaggaggctgaggcacaagaatcccttgaacctgggaagcggaggttgcagtgagccgagattgcgccactgcactccagcctgggcaacagagtgagaccctgtctcagaaaaaaaaagaaagaaagaaaaaatagaggaatatttcccaacttgttttcgaagccagcataatcctggtaccaaaaccaaacaaggacattataagaaaagaaaatatagaccaatattcctgttagcatagacatgcaacagctaaccaattttagcaaaccaaacctggtaatatagaaaaaaggataaataggccagtcgcggtggctcacgcctgtaatcccagcactttgggaggctgaggcaggcagatcacttgaggtcaggagtttgagaccagcctgaccaacatggtgaaaccccgtttctaataaaaatacaaaaatcaggctgggcacggtggctcacgcctgtaatcccagcactttgggaggccgaggtgggcagatcacgaggtcaggagttcaagaccagcctgaccaatgtggtgaaacgccatctctactaaaaatacaaaaatcagccggtgtggtggcacctgcctgtaatcccagctactcaggaggctgaggcagaattgcttgaacccgggaggcagaggttgcagtgagccaagatcgtgccactgcactccagcctgggcgacagagcaagacttcatctcaaaaaaaaaaaaaaattagctgggcatggtggtgggcacctgaaatcccagctactcgggagtctgaggcaggagaatcgcttgaacccaggaggcagaagttgcactgagctgggatcacaccattgcactccagcctgggcaacagagtgagactccatctcaaaaaaagaaaaagaaaaaggataaatacattctaaccaaataatgtttatctcatgattgtagctgattcaacattcaaaaattggcctggtgcagtagctcaggcctgtaatcccaacattttaggaggctgaggcaggaagatctcttgagcccaggatttcaagaccagcctgggcaacatagtcagactggtctttactggggggaaaaaaatcagtctgtgtaattcaccacattaacaaagggaaacataaaaaccctatgatcatttcaacagatgtagcaaaagcagttaatgatattcaacacatatgcatgattacaaaccaaccaacctcctagcaaactagggaaaggaaacttaacctagtttgataacagggcgtccacagtcggagttccactagcagcatacataatggtagaaaactcagtgctgccgggcgcggtggctcacgcctgtaatgccagcactttgggaggcctaggcgggcggatcacgaggtcaggagatcgagactgtcctgactagcatgctgaaaccccgtctctactaaaaatacaaaaacaaaaaattagccgggcatggtggcgggcgcctatagtcccagctactcgggaggctgaggcgagagaatggcgtgaacccgggaggcggagcttgcagagcctagatcgtgccactgcactccagcctgggtgacagagtgagacttcgtctcaaaaaaaaaaaaaaaaaaaaaagaaaagaaaactcaacgctttttcctctaagatcaggaactagaaaaggatttgactctcacaacgttgataccatactggaggttttaaccaggcaagaaaaagaaataatgagggccgggtgcggtggctcaggcctgtaatcccagcactttgggaagccgagacgggtggatcacgaggtcaggagatcgagaccatcctggctaacacggtgaaaccctgtctctactaaatatacaaaaaattagccgggcgtagtggcgggcgcctgtagtcccagctactcgggaggctgaggcaggagaatggcgtgaactcagggggcggagcttgcagtgagctgagatcgagccactgcactccagcctgggcgacagagcaagactgtgtctcaaaaaaaaaaaaagaaaaagaaataatgattagtggcccgatgtctcacgcctataatcccagcactttgggaggccgaggtgggcagatcacctgaggtctggagttggagaccagcctgacaaagatggtgaaacctcgtctctattaaaatattaaaaaaatagccaggcgttggccgggtacagtggctcatgcctgtaatcccagcactttgggaggccgaggtgggtggatcacctgaggtcaggagttcaacaccagcctggccaacatggtgaaaccccatctctactaaaaatacaaaaattagccgggcgtagtggcgggcgcctgtaatcccagctacttgggaggcttaggcaggagaatcgcttgaacctgggaggcggaggttgtagtgagccgagattgcaccattgcactccagcctgggtgacaaaagcaaaaactccgtctcaaaaaaaaaagaattagccaggggtagtggtgaacgcctgtagtcccagctactcaggaggcagaggcaggagaatcacttgaacccaggaggcagaggttgcagtgagccgagattgtcccattgcactccagcctaggcgacaagagcaaaattccatgtcaaaaaaaaaaaaaaaaaaggaaagaaaaaaaataacgattagaaaggaagaaataaaacacattcacagccagtatgattctatacatacatgtcctaatggggccaggcgtggtggctcatgcctgtaatcctagcacttttaggaggctgaggcaggtggcttccctgggaccagcctggccaacatggtgaaaccccaactctaataaaaatacaaaaaatcagccaggcgtggtgacgggcacctctaatcccagctactcaggaggctgaggcaggagaattgcttggacctgggaggcagaggttgcagtgagccgagatcgcgctattgcactccagcctgggcaacaagagtgaaactccggcagggtgtggtggcttacgcctgtaatcccagcacttcgggaggctgaggcaggccgatcacctgaggtcaggagtttgagaccaacctaacatggtgaaaccccgtctctactaaaaatacaagaattagctgggtgtagtggtgggcgcctgtaatcccagctacttgggaggctgagacagaagaattgcttgaacccaggaggtggaggttgcagtgagctgagatcatgccattgcacaccacgccgggcaacagagcgagattccgtctcaaaaaaaaaaaaaaagagtgaaactctatctcaaaaaaaaaaaaaagtcctaatggaaaatccataaaaagctaccaaaactaataaataaatatagcagggttgcaggttacagggcaatatagttatccctctatctgtaggggcttggttctgggactcctcacacaccaaacccacagatgtctaagtcccatatataagacggtatagtatttggatttaacctacacatatcctcccatatagtttaaattatctctagattacttacattacccccatacaatgaaaatgctaatgtacatgcaagtatgtatgtaagtacttgtactatattgtttagggaatcactggacatataggccttcaagactgataccagcagccactgttaagattctggtcaggcctgcccctgtttggggtctcagttgatctcattgccttcccacccagccaagggcacctgcatttctcttggctccctggccatttggaaggcctagttcagcctggcacatttgtatcctggcccactgatgctggtacccctgggaaggtcctgctctgaaaaacacggagattttagttgctactgaagatttgagagataaagacagggagacctgtctgtagacctgtgtccctccaagtgggattgagactttgggccccccatttcaggacagcacctcctggcctgttgactgaatagatccctgaaggaggtgtacttgcattaatggagtgggggtgggagcagtaccacagatccgcactaacaatcacacagttctctctagaataataatatagaacaagtgaaatagaacaattgcagaaagagctaacctttgttgagctcttactgtgtgcccagcactttcctcaactctacatttcccataatacacagagtactaggtaggccaggcttggtggctcacgcctgtaatcccagcactttaggaggccaaggggggtggatcacctgaggtcgggagttcaagaccagcctgaccaacatggtgaaaccccgtctctactagaagtacaaaattagccaggtgtggtggcacatgcttgtagtcctagctactcagcaggctgaggcaggagaatcatttgaatccgggagaaggaggttgcagtaagcggagatagtgccactgtactccagcctgggcaataagagctgagactccgtctcaaaataaaataaaataaaataaaataaaataaaataaaataaaaaaagaaaagagcctgccattaaaggagctgtttggtaggggatgttttgtcagtgcaaacaacagaaaagtgggctgggcacagtggttcatgcctgtaatcccagcactttgggaggccaaggcgggcggatcacctgaagttgggagttcaagaccagcctgaccaatatggagaaaccccgtctctactaaaaatacaaaattagccgggcgcagtggcgcatgcctgtaatcccagctactcgggaggctgaggcaggagaatcgcttgaacctgggaggcagaggttgcggtgagccgagatcgcaccattgcactccagcctggacgagagcaaaactctgtctcaaaaaaaaaaaaaaacagaaaagtgtaacaaacacttacagtaggcatgtttcttagcaaatctgatgacaaatttggcataaagaaagagagcatccctgaaaaaaaaaaaaagaaaaagaaagagagcatcctgcctgggcaacatagtgaaaccctgcctctacaaaaaaactcaaaaattggccgggtgcagtggctcacacctgtaatcccagcactttgggagtcggaggcgggaggatcacctgaggtcaggagttcgaaaccagcctggccaacatggcaaaaccccatctctactaaaaatacaaaaaattaatcaggcgcattggtgggcgcctgtaatcccagctactcaggaagttgaggcaagaggatcgcttgaatctgggaggtggaggttacagtgagtcgagatcacaccactgcactctagcctgggtgacagggcgagactccgtctccaaaaaaaaaaagaaaaagaaaaagactaaaaaattagccaggcaggcctctgtggtcccagctacttgggaggctgaggcaggagaatcactgagcccaggagtccgaggctgtagtgagccatgattgcaccactgtaccctagcttgggcaacaaagcaagaccctgcctcaaaagaaaaaagaaagaaagaaagaacatggcgggccaggcacagtggctcacacctgtaatcccagcgctttgagaggccgaggcaggtggatcacaaggtcaggagttccacaccagcctggccaacatggtgaaaccctgtctctactaaaaatacaaaaaatcagccaggcatggtggcaggggcctgtaatcccagctactcgggaggctgaggcaggagaattgcttgaaaccagaaggcagaggttgcagtgagcctagactgcaccactgcactccagcctgggcgaaaagagccaaactccatctcaaaaaacaaacaaaaaaacaaaacaaaagaaaacatggcaaagcctttgaaagcttgtctgggagaaggtgcgatgatagttgcataacttcgtgcaagatgctggtccacacaggggctgccccttgctctttctcgctctcttaacctctcatataacaggcttgtgtgttattcacatttattgagcccaagcaggtgcaaggcattgtgatctaatactttggtcagcaagacaacaagatagatcactgccctgcccttaggaagtgtatatgctattagaggaaacagataaaataaacaaggaaaagtatcagacaatgtaagtgctatgagaatgcaaatgaggtgatgtgaattaaaataggatgacttaaagtctgcacgggaaggagcctacccccatgttcctggctagccaaggaaccaccagttgattagcagagaagggcagccagtctagctagagcttttggggaagagggagtggttgttaagagatgagattaaagaagccgagacgggccattcgtgaggggtttgtaatgcagggctgaggagtgtccgaagagaatgggcaggtgagcggtgagacagttgttcttccagaagctttgcagtgaaaggaatcaaagaaatggagccgtgtatcaggtggggaagggtgggggccaagggggtgtccttccccatacagagattgcaggctgagaatgactatatccttgttaacaggaggtgggagcagggcacggtagctcacacctgtaatcttggcactttaggaggctgaggcgggccgatcacctgaagtaaggagttcgagaccagcctggccaacatgcaaagccctgtctctactaaaaatacaaaaattagctgggtgtggtggtactcgcctgtaatcccagctactcgggagactgaggcaggagaatggcttgaacccggaaggtagaggttgcagtgagctgagatcatgccactgtgctccagcctaggtgacagagagagactccatctcaaaaaaaaaaaaaaaatacaggaagggagttgggaatagggtgcacatttaggaagtcttggggatttagtggtgggaaggttggaagtccctctctgattgtcttttcctcaaagaagtgcatggctggtgaggggtggggcaggagtgcttgggttgtggtgaaacattggaagagagaatgtgaagcagccattcttttcctgctccacaggaagccgagctgtctcagacactggcatggtgttgggggagggggttccttctctgcaggcccaggtgacccagggttggaagtgtctcatgctggatccccacttttcctcttgcagcagccagactgccttccgggtcactgccatggaggagccgcagtcagatcctagcgtcgagccccctctgagtcaggaaacattttcagacctatggaaactgtgagtggatccattggaagggcaggcccaccaccccgaccccaaccccagccccctagcagagacctgtgggaagcgaaaattccatgggactgactttctgctcttgtctttcagacttcctgaaaacaacgttctggtaaggacaagggttgggctggggacctggagggctggggacctggagggctggggggctggggggctgaggacctggtcctctgactgctcttttcacccatctacagtcccccttgccgtcccaagcaatggatgatttgatgctgtccccggacgatattgaacaatggttcactgaagacccaggtccagatgaagctcccagaatgccagaggctgctccccgcgtggcccctgcaccagcagctcctacaccggcggcccctgcaccagccccctcctggcccctgtcatcttctgtcccttcccagaaaacctaccagggcagctacggtttccgtctgggcttcttgcattctgggacagccaagtctgtgacttgcacggtcagttgccctgaggggctggcttccatgagacttcaatgcctggccgtatccccctgcatttcttttgtttggaactttgggattcctcttcaccctttggcttcctgtcagtgtttttttatagtttacccacttaatgtgtgatctctgactcctgtcccaaagttgaatattccccccttgaatttgggcttttatccatcccatcacaccctcagcatctctcctggggatgcagaacttttctttttcttcatccacgtgtattccttggcttttgaaaataagctcctgaccaggcttggtggctcacacctgcaatcccagcactctcaaagaggccaaggcaggcagatcacctgagcccaggagttcaagaccagcctgggtaacatgatgaaacctcgtctctacaaaaaaatacaaaaaattagccaggcatggtggtgcacacctatagtcccagccactcaggaggctgaggtgggaagatcacttgaggccaggagatggaggctgcagtgagctgtgatcacaccactgtgctccagcctgagtgacagagcaagaccctatctcaaaaaaaaaaaaaaaaaagaaaagctcctgaggtgtagacgccaactctctctagctcgctagtgggttgcaggaggtgcttacacatgtttgtttctttgctgccgtcttccagttgctttatctgttcacttgtgccctgactttcaactctgtctccttcctcttcctacagtactcccctgccctcaacaagatgttttgccaactggccaagacctgccctgtgcagctgtgggttgattccacacccccgcccggcacccgcgtccgcgccatggccatctacaagcagtcacagcacatgacggaggttgtgaggcgctgcccccaccatgagcgctgctcagatagcgatggtgagcagctggggctggagagacgacagggctggttgcccagggtccccaggcctctgattcctcactgattgctcttaggtctggcccctcctcagcatcttatccgagtggaaggaaatttgcgtgtggagtatttggatgacagaaacacttttcgacatagtgtggtggtgccctatgagccgcctgaggtctggtttgcaactggggtctctgggaggaggggttaagggtggttgtcagtggccctccgggtgagcagtaggggggctttctcctgctgcttatttgacctccctataaccccatgagatgtgcaaagtaaatgggtttaactattgcacagttgaaaaaactgaagcttacagaggctaagggcctcccctgcttggctgggcgcagtggctcatgcctgtaatcccagcactttgggaggccaaggcaggcggatcacgaggttgggagatcgagaccatcctggctaacggtgaaaccccgtctctactgaaaaatacaaaaaaaaattagccgggcgtggtgctgggcacctgtagtcccagctactcgggaggctgaggaaggagaatggcgtgaacctgggcggtggagcttgcagtgagctgagatcacgccactgcactccagcctgggcgacagagcgagattccatctcaaaaaaaaaaaaaaaaggcctcccctgcttgccacaggtctccccaaggcgcactggcctcatcttgggcctgtgttatctcctaggttggctctgactgtaccaccatccactacaactacatgtgtaacagttcctgcatgggcggcatgaaccggaggcccatcctcaccatcatcacactggaagactccaggtcaggagccacttgccaccctgcacactggcctgctgtgccccagcctctgcttgcctctgacccctgggcccacctcttaccgatttcttccatactactacccatccacctctcatcacatccccggcggggaatctccttactgctcccactcagttttcttttctctggctttgggacctcttaacctgtggcttctcctccacctacctggagctggagcttaggctccagaaaggacaagggtggttgggagtagatggagcctggttttttaaatgggacaggtaggacctgatttccttactgcctcttgcttctcttttcctatcctgagtagtggtaatctactgggacggaacagctttgaggtgcgtgtttgtgcctgtcctgggagagaccggcgcacagaggaagagaatctccgcaagaaaggggagcctcaccacgagctgcccccagggagcactaagcgaggtaagcaagcaggacaagaagcggtggaggagaccaagggtgcagttatgcctcagattcacttttatcacctttccttgcctctttcctagcactgcccaacaacaccagctcctctccccagccaaagaagaaaccactggatggagaatatttcacccttcaggtactaagtcttgggacctcttatcaagtggaaagtttccagtctaacactcaaaatgccgttttcttcttgactgttttacctgcaattggggcatttgccatcagggggcagtgatgcctcaaagacaatggctcctggttgtagctaactaacttcagaacaccaacttataccataatatatattttaaaggaccagaccagctttcaaaaagaaaattgttaaagagagcatgaaaatggttctatgactttgcctgatacagatgctacttgacttacgatggtgttacttcctgataaactcgtcgtaagttgaaaatattgtaagttgaaaatggatttaatacacctaatctaaggaacatcatagcttagcctagcctgctttttttttttttttttttggagacagagtctcactctgtcacccaggctggagtgcagtggcgggatctcggctcactgcaacctccgccttctgggttcaagcgattctcctgcctcagcccactgagtagctgggattacaggcacctgccccgacgcccagctaattttttgttatttatttatttttttttttagtagagatgaggtttcaccatgttggccaggctagtctcgaactcctgaccttgtgatctgcctgccttggcctcccaaagtgctgggattacaggcgtgagccaccgcacccggcctgcctagcctacttttattttatttttaatggagacagcatcttgctctgttgcccaggctggattacagtgatgtgatcatagctcattataccctcctgggctcaagcaatccccctaactctgcctccccagtagctaggaccacaggcatacaccaccatacccagctaatttttaaaattttttgtagatagatagagtctcactatgttgcccaggctggtctctagcctacttttttgagacaaggtcttgctctgtcacccaggctggatagagtgcagtagtgcagtcacagctcactgcagcctccacctcccaggctccatccatcctcccagctcagcctcccaagttgcttcaactacaggcctgcaccaccatgcctggctaatttttatttatttatttttattttattttattttatttttttgagactcagtctcactctgtcgcccaggctggagtgcagtggcatgatctcggctcactgcaacctctgcctcctgggttcaagtgattctcctgcctcagcctcccgaatagctaggactacaagcgcctgctaccacgcccagctaatttttgtatttttagtagagacagggtttcaccatgttggccaggctggtctcgaacttctgaccatgtgatccgcccgcctcggcctcccaaagtgctgggattacaggtgtgagccaccacgcccggctaatttttatttatttatttaaagacagagtctcactctgtcactcaggctagagtgcagtggcaccatctcagctcactgcagccttgacctccctgggctccggtgatttcaccctcccaagtagctaggactacaggcacatgccacgacacccagctaattttttattttctgtgaagtcaaggtcttgctacgttgcccatgctggtatcaaacccctgggctcaatcaatccttccacctcagcctccccaagtattggggttacaggcatgagctaccacactcagccctagcctacttgaaacgtgttcagagcatttaagttaccctacagttgggcaaagtcatctaacacaaagccctttttatagtaataaaatgttgtatatctcatgtgatttattgaatattgttactgaaagtgagaaacagcatggttgcatgaaaggaggcacagtcgagccaggcacagcctgggcgcagagcgagactcaaaaaaagaaaaggccaggcgcactggctcacgcctgtaatcccagcatttcgggaggctgaggcgggtggatcacctgaggtcaggagttcaagaccagcctagccaacatggtgaaaccccgtctctactaaaatacaaaaattaaccgggcgtgatggcaggtgcctgtaatcccagctacttgggaggctgaggcaggagaatcgcttgaaccaggaggcggaggttgcagggagccaagatggcgccactgcactccagcctgggcgatagagtgagactccgtctcagaaaaaaaagaaaagaaacgaggcacagtcgcatgcacatgtagtcccagttacttgagaggctaaggcaggaggatctcttgagcccaagagtttgagtccagcctgaacaacatagcaagacatcatctctaaaatttaaaaaagggccgggcacagtggctcacacctgtaatcccagcactttgggaggtggaggtgggtagatcacctgacgtcaggagttggaaaccagcctggctaacatggtgaagccccatctctactaaaaacacaaaaattagccaggtgtggtagcacacgcctgtagtcccagctactcgggaggctgaggcacaagaatcacttgaaccccagaggcggagattgcaatcagccaagattgcaccattgcactcccgcctgggcaacagagtgagaccccatctcaaaataaataaataaatatttttaaaagtcagctgtataggtacttgaagtgcagtttctactaaatgcatgttgcttttgtaccgtcataaagtcaaacaattgtaacttgaaccatcttttaactcaggtactgtgtatatacttacttctccccctcctctgttgctgcagatccgtgggcgtgagcgcttcgagatgttccgagagctgaatgaggccttggaactcaaggatgcccaggctgggaaggagccaggggggagcagggctcactccaggtgagtgacctcagccccttcctggccctactcccctgccttcctaggttggaaagccataggattccattctcatcctgccttcatggtcaaaggcagctgaccccatctcattgggtcccagccctgcacagacatttttttagtcttcctccggttgaatcctataaccacattcttgcctcagtgtatccacagaacatccaaacccagggacgagtgtggatacttctttgccattctccgcaactcccagcccagagctggagggtctcaaggaggggcctaataattgtgtaatactgaatacagccagagtttcaggtcatatactcagccctgccatgcaccggcaggtcctaggtgacccccgtcaaactcagtttccttatatataaaatggggtaagggggccgggcgcagtggctcacgaatcccacactctgggaggccaaggcgagtggatcacctgaggtcgggagtttgagcccagcctgaccaacatggagaaaccccatctctactaaaaatacaaaagtagccgggcgtggtgatgcatgcctgtaatcccagctacctactcgggaggctgaggcaggagaatcgcttgaacccgggaggcagaggttgcggtgagctgagatctcaccattacactccagcctgggcaacaagagtgaaactccgtctcaaaaaagataaataaagtaaaatggggtaagggaagattacgagactaatacacactaatactctgaggtgctcagtaaacatatttgcatggggtgtggccaccatcttgatttgaattcccgttgtcccagccttaggcccttcaaagcattggtcagggaaaaggggcacagaccctctcactcatgtgatgtcatctctcctccctgcttctgtctcctacagccacctgaagtccaaaaagggtcagtctacctcccgccataaaaaactcatgttcaagacagaagggcctgactcagactgacattctccacttcttgttccccactgacagcctcccacccccatctctccctcccctgccattttgggttttgggtctttgaacccttgcttgcaataggtgtgcgtcagaagcacccaggacttccatttgctttgtcccggggctccactgaacaagttggcctgcactggtgttttgttgtggggaggaggatggggagtaggacataccagcttagattttaaggtttttactgtgagggatgtttgggagatgtaagaaatgttcttgcagttaagggttagtttacaatcagccacattctaggtaggggcccacttcaccgtactaaccagggaagctgtccctcactgttgaattttctctaacttcaaggcccatatctgtgaaatgctggcatttgcacctacctcacagagtgcattgtgagggttaatgaaataatgtacatctggccttgaaaccaccttttattacatggggtctagaacttgacccccttgagggtgcttgttccctctccctgttggtcggtgggttggtagtttctacagttgggcagctggttaggtagagggagttgtcaagtctctgctggcccagccaaaccctgtctgacaacctcttggtgaaccttagtacctaaaaggaaatctcaccccatcccacaccctggaggatttcatctcttgtatatgatgatctggatccaccaagacttgttttatgctcagggtcaatttcttttttcttttttttttttttttttctttttctttgagactgggtctcgctttgttgcccaggctggagtggagtggcgtgatcttggcttactgcagcctttgcctccccggctcgagcagtcctgcctcagcctccggagtagctgggaccacaggttcatgccaccatggccagccaacttttgcatgttttgtagagatggggtctcacagtgttgcccaggctggtctcaaactcctgggctcaggcgatccacctgtctcagcctcccagagtgctgggattacaattgtgagccaccacgtccagctggaagggtcaacatcttttacattctgcaagcacatctgcattttcaccccacccttcccctccttctccctttttatatcccatttttatatcgatctcttattttacaataaaactttgctgccacctgtgtgtctgaggggtgaacgccagtgcaggctactggggtcagcaggtgcaggggtgagtgaggaggtgctgggaagcagccacctgagtctgcaatgagtgtgggctggggggcccagtgcccgggttccgggaggggaacaaaggctggagactgggtcagtctgcgggctgcatgacaacaagggagggggtggctccattcataactcaggaaccaaccgtccctcctcccctccggccacggccacggctggcacaaggttctctccctcccctgcttctaggactgggctgcttccccctcggcagcctctcaccaaggattacgggatttaaatgtctgatttagcaaggctgagcctccagggtggccatctgctccatcagaaagtggcaggatacctgggttcccaaggggaacaggggtgggtgctactggatggagagaggccagtgggaggcctgctagccagggtcccaggaaagtgggggcagctaaggtaagagtaggggtgtggggctaggtccttcccagcatcccctcatcctgggcctcatgccaggtagctgaatgaattgaagctttaaactctgccaggaaaacctttcaaagggcttcttgggatagggaggagagtcgggttgaggagctcagtaccgcctgcccatgctcctcagggctgctggctcccagggaggggggctgggagcaggcaggctcttccccatcacccactgctctcttggagccagtgcttgaaggggcagtcagacatggcttgcccttcctcctccctggtggtggagacaggtgttagggtccagtgggtgctactgtccaggggggcttctggggccactagcctgtcagctcatcaaccaggctgaaggtgcaagcaggagccccttgccttgccccaaggatcccagacagctatgaagccaccagccttcctgacctcaagaccaccttttttttttctctttcttactagggaatgccaaacactctccccaggagatccagacccgcctctttcagagacttttaacttaaacatctgtccctacccagcaggcaaactagagctcctgaagctcagtccctgtccttgcctctgtagacaggtcaccttgatgagcttcctttttttttttttaatttttttttattttaggctttattggggcataattgatcccccaaaattgcatacattcaaggtatgcagtgtgatgatttgatatgggggtatattgtgaaaccattaccacaatcaaattaatcagcacgtccatcatcacacacagttaccatttgtgtgtgtgcacgtgtgttcacctacgacgaggacacttggacctactctgcagatctcaagtaaacagaaaatctccctttttgacaaccatcctccaccctttcaatcccaaccttttcctagattatgtccctagctctgtttttatttctgctgtgctgcttcagatccattctgactctgccaaacccttctttgtgagctgatagattgctggattgagaattacagctgggcgcggtggctcacgcctgtaatcccaacactgtgggaggccaaggccggcggatcacttgaggtcaggagttggagaccagcctgaccaacaagatgaaaccccatctctactaaaaatacaaaattagctgggcatggtggtgcacgcctgtaatctcatcttcttgggaggctgaggcaggagaattgcttgaacccgggaggtggaggttgcagtgagccaagatcctgccattgcactccagcctgggcaacaacagtgaagctccatctcaaaacacacaaaaaaaagaagtacaaagtctgagacttcaggccagctctgctacactatatactctaacctctctggtcctacttggtgacttctttccctctggtcgtgttcaagttcccgtcccatccagtcaagcaggtactcattggtaccttaccctgtg

SEQ ID NO: 412 - DNA, 2166 bp, Homo sapiens
ccgcccagttcctgttcccagactgaggcccagcccccttcgcccgtttccatcacgagtgccgccagcatgtctgacaaactgccctacaaagtcgccgacatcggcctggctgcctggggacgcaaggccctggacattgctgagaacgagatgccgggcctgatgcgtatgcgggagcggtactcggcctccaagccactgaagggcgcccgcatcgctggctgcctgcacatgaccgtggagacggccgtcctcattgagaccctcgtcaccctgggtgctgaggtgcagtggtccagctgcaacatcttctccacccaggaccatgcggcggctgccattgccaaggctggcattccggtgtatgcctggaagggcgaaacggacgaggagtacctgtggtgcattgagcagaccctgtacttcaaggacgggcccctcaacatgattctggacgacgggggcgacctcaccaacctcatccacaccaagtacccgcagcttctgccaggcatccgaggcatctctgaggagaccacgactggggtccacaacctctacaagatgatggccaatgggatcctcaaggtgcctgccatcaatgtcaatgactccgtcaccaagagcaagtttgacaacctctatggctgccgggagtccctcatagatggcatcaagcgggccacagatgtgatgattgccggcaaggtagcggtggtagcaggctatggtgatgtgggcaagggctgtgcccaggccctgcggggtttcggagcccgcgtcatcatcaccgagattgaccccatcaacgcactgcaggctgccatggagggctatgaggtgaccaccatggatgaggcctgtcaggagggcaacatctttgtcaccaccacaggctgtattgacatcatccttggccggcactttgagcagatgaaggatgatgccattgtgtgtaacattggacactttgacgtggagatcgatgtcaagtggctcaacgagaacgccgtggagaaggtgaacatcaagccgcaggtggaccggtatcggttgaagaatgggcgccgcatcatcctgctggccgagggtcggctggtcaacctgggttgtgccatgggccaccccagcttcgtgatgagtaactccttcaccaaccaggtgatggcgcagatcgagctgtggacccatccagacaagtaccccgttggggttcatttcctgcccaagaagctggatgaggcagtggctgaagcccacctgggcaagctgaatgtgaagttgaccaagctaactgagaagcaagcccagtacctgggcatgtcctgtgatggccccttcaagccggatcactaccgctactgagagccaggtctgcgtttcaccctccagctgctgtccttgcccaggccccacctctcctccctaagagctaatggcaccaactttgtgattggtttgtcagtgtcccccatcgactctctggggctgatcacttagtttttggcctctgctgcagccgtcatactgttccaaatgtggcagcgggaacagagtaccctcttcaagccccggtcatgatggaggtcccagccacagggaaccatgagctcagtggtcttggaacagctcactaagtcagtccttccttagcctggaagtcagtagtggagtcacaaagcccatgtgttttgccatctaggccttcacctggtctgtggacttatacctgtgtgcttggtttacaggtccagtggttcttcagcccatgacagatgagaaggggctatattgaagggcaaagaggaactgttgtttgaattttcctgagagcctggcttagtgctgggccttctcttaaacctcattacaatgaggttagtacttttagtccctgttttacaggggttagaatagactgttaaggggcaactgagaaagaacagagaagtgacagctaggggttgagaggggccagaaaaacatgaatgcaggcagatttcgtgaaatctgccaccactttataaccagatggttcctttcacaaccctgggtcaaaaagagaataatctggcctataatgttaaaagaaagcaggaaggtgggtaaataaaaatcttggtgcctggaaaaaaaaaaaaaaaaaaaaaaaaaaaaaaaaaa

SEQ ID NO: 413 - DNA, 4192 bp, Homo sapiens
  misc_feature (1259)..(1259): n is a, c, g or t.
  misc_feature (1389)..(1389): n is a, c, g or t.
  misc_feature (2541)..(2541): n is a, c, g or t.
tgaagccgcgctcccctggaagcgacccaggggaggccaagttgtcagctttttgatcctctactgtgcatctccttgactgccgcatcatgggagtaagttcttcaaacacccatttttgctctatgggaaaaaaacgatttaccaattaatattactcagcacagagatgggggcccggtttccatattttttgcacagctagcaattgggctccctttgctgctgatgggcatcattgtttaggggtgaaggagggggttcttcctcaccttgtaaccagtgcagaaatgaaatagcttagcggcaagaagccgttgaggcggtttcctgaatttccccatctgccacaggccatatttgtggcccgtgcagcttccaaatctcatacacaactgttcccgattcacgtttttctggaccaaggtgaagcaaatttgtggttgtagaaggagccttgttggtggagagtggaaggactgtggctgcaggtgggactttgttgtttggattcctcacagccttggctcctgagaaaggtgaggagggcagtccaagaggggccgctgacttctttcacaagtactatctgttcccctgtcctgtgaatggaagcaaagtgctggattgtccttggaggaaacttaagatgaatacatgcgtgtacctcactttacataagaaatgtattcctgaaaagctgcatttaaatcaagtcccaaattcattgacttaggggagttcagtatttaatgaaaccctatggagaatttatccctttacaatgtgaatagtcatctcctaatttgtttcttctgtctttatgtttttctataacctggattttttaaatcatattaaaattacagatgtgaaaataaagcagaagcaacctttttccctcttcccagaaaaccagtctgtgtttacagacagaagagaaggaagccatagtgtcacttccacacaattatttatttcatgtctttactggacctgaaatttaaactgcaatgccagtcctgcaggagtgctggcattaccctctgcagaacagtgaaaggtattgcactacattatggaatcatgcaaaaggaaaaaaagtttcatgatatctgttgttggcagtttttgtttatctctgacagtttttagttaaatgtttagatcctcagaactacattagtgcctactattaacttactctgtctcttgttaaaggctaaatctgcgcttctccctggtgccagcaggttccnctcacagtcaatgcagtggtatagcatatcctcacatttctagtgcccttgagactgtgctatggaaccaatcttgaacatacatgcattgacttgacaagttactgagtaagcagcatatcagcaaggngccactacagcctactctgccagacactgagcttggggccctagggaagatagagaattatacaaggcaaagtccttctctttagggctcttacaatctatcacttccaaaaagtaaatggtgactgataaaacaattggcagaacctgtttgattactgtgacagtcttaatgataccataaatcaatattagaaagctagttgacttaaagcctgaaataatgggagttttctcctccacttattagaataaggaccctcagtgactaattattgtgggtagggtcaagattaactagttttatacagagttctgctgtaaatagtcattttgcattgattagtgcagttctctgaatcataaagcaagttttacctctctgtacatgtttttgcagacatacttgaaaagctccttaaatctaggtgcttcaattcagcttttcttgagagcacaaatgaaaagctgtggagaaaatgtcctcattaaagtattaaagtgtgggcagaattacaattacaaagtgccagccaccgaataaagataaaagttcagttccttaaaatgagtttttatgagataacagtcagtgatcttggtgttaccgggattccacatggggcagtgggaaagagttcaggttttgaaggtaacctagtttagatttgaattccagctatgtgacattgggtaaatttgtagtagtcctgagcctcagcgtcctcatctataaaatgactggcgaaaatacttcacaagctcattttgagcactttaggaagtaagtgaaagtacctaaaatagcaggcacccaattgatgattttatatcttccttctttgcttgcagtgatttcaggatgtcctcatatctatttataggtctaaaattatatcttaaagtatgttgtagaataaattaaaaggataactaaatcaccatttagattaagcttgacttgcaaactaggaagaagcacctaggcctttctttgaaaatatttttttggttcgttttggtaaagctctataaattggtatctattattttaccaatttttttttagtagtaagtccatttagagaactaaccatattatttatggaataattagcatgaggaaggtataattgcattttttttttttttnagacggagcttgcactgtagccccagctggactgcagtggcgtgatcttggctcactgcaacctccgcctcccaggttcaagcgattctcctgcctcagcctcccgagcagctgagactacaggcgcctgccaccacgcctggccaattttttttttttttagtagagactgcgtttcaccatgttgggcaggctggtcttgaactcctgaccttgtgatccacctgcctcggctctcagagagctgggattacaggtgtgagccgccgtgcccagccattgcatttttattcacatacacattgttaatgtggaacaatttaacactaatctcatcagagagcgagatgaatgtggcaattgctcattttattttgcatatattaaattgagtaggttcagctctaacataccttaagaaaaatgcatatcggtgcactgtatgtatttcaaaatgcctttcctatgattgtcatgtcctcctttaaggcttttccctcaaatttattacaaatttagtatttttagtacttgatgactctaattacatgaatgcacctggaatgacatttgtaacagaagacggtctgacttgctttcagtattcacaagttctttccagtttccaagtcttttcctagcagtaatttaggggagacagaggagtttcatgtaaagagcatgcagtttggagtcagaacctgggtatgactctgtggccttgatgaagcaagttacttaaactcttgagttttagctttctcctttacaatgcatgaatgcctatccccctacaaaacaaagattaaatgtgatgatgtatgccaaggcgctttgtatattgtaaagtgctatataattataagatgttctaaattttcaaggacctaaaccaggcattggcaaacgtttttccagggagtaaatattttacgctttgcatatataatttatggaggtgttgagaggatagattagacacttgaagtactcaggatagtgcctggcatgtaggaagcacctggaaaatattcgctgtgattaccatcagtccattttaccgaggaaggagccaaggtccaggcccactgaagggacttgcataacattacaatagcagtggcagaaccagccatgcttctgcaaatcacaacctctttgagcctctgtcacctgaactgcaaaatgagtgggttagacaaaatcatctgttgggacctcctagttccacggtgctatcattctaccaactggcgccctaaggttgaaagtgcttatctgctttccaatgtggcttccttacagtctggaactgcaatatgcaggagcagtaaactggcagaaaaccaggaatcagagaaagaaaatataatttaactttaaagatgtaaattatatatatagtatattatatatatttttaaagctttatatgcctcaaatatcagggaaaggagccaagtccttggtatttagtttggtgaatacttgcattgaatacatgtcaagatgtcaagacatttttgaatgtgtctcagggatttctatgctacacattcttttaacaaatcaagtatttatgtacacatgttcagattttttgacaaaatgattaaaataatgagatggaaaatgaaaaaaaaaaaaaaaa

SEQ ID NO: 414 - DNA, 3251 bp, Homo sapiens
gtggaataaagtttagaaaatatccaagtttatctgcctgtaaattctgggtagttcagttgtctaccatgctgttaattaaatgaaaacatcctgttatttcagggtccttccttgacaaagtactatacagctgaagaacatctcgaatacagttttggtgggaaaggagccaattgatttcaacagaatcagatctgagcttcataaagtctttgaagtgacttcacagagacgcagacatgtgcacttgaagatgctgccccttccctggtacctagcaaagctcctgcctctttgtgtgcgtcactgtgaaacccccacccttctgcctcgtgctaaacgcacacagtatctagtcaggggaaaagactgcatttaggagatagaaaatagtttggattacttaaaggaataaggtgttgcctggaatttctggtttgtaaggtggtcactgttcttttttaaaatatttgtaatatggaatgggctcagtaagaagagcttggaaaatgcagaaagttatgaaaaataagtcacttataattatgctacctactgataaccactcctaatattttgattcattttctgcctatcttctttcacatatgtgtttttttacatacgtccttttccccccagtttgtttccttttattttatagagcagaaccctagtcttttaaaccagtttagagtgaaatatatgctatatcagtttttactttctctagggagaaaaattaatttactagaaaggcatgaaatgatcatgggaagagtggttaagactactgaagagaaatatttggaaaataagatttcgatatcttctttttttttgagatggagtctggctctgtctcccaggctggagtgcagtggcgtaatctcggctcactgcaagctccgcctcctgggttgacaccattttcctgcctcagcctcctgagtagttgggactaccagtagatgggactacaggcacctgccaacacgcccggctaatttttttgtatttttagtagagacggggtttcaccatgttagccaggatggtctggatctcctgacctcgtgatccacccgcctcggcctcccaaagtgctgcgattacaggcatgagccaccgcgcctggccgctttcgatattttctaaactttaattcaaaagcactttgtgctgtgttctatataaaaaacataataaaaattgaaatgaaagaataattgttattataaaagtactagcttacttttgtatggattcagaatatactaaattaactttttaaaacacaacttttaaaaaatgtatcaaaaataataaacgtgttctgatatttttaaaataagtgaccttgtgttctttaaccagtccacatctttagagaacaaaaatgtgttatgatattatgggccatgctaatgacctctagaaaacatcagaatatttctggatatttaataatagctttatatatgactaatgctcatttctatgtaattctgtttaatagttgctttaaaggtgaattttgccacatttactttgacagcagtataaggagtgagatagacatgaacctgaatttcaatttaaaatcatggaagagagggaaaaaaaaccagcttaagaaaatcaactgataaactgcagaaaaaatgcaacttaacatcacaaagctaatgctttattatttagagagtacttaaaaattaaagaccaaacttctctccacccaacaaaaatgggcaaaggacatacagctaggtcaccaagaaagaagggcaaataggtggtgagtacatgtaaagatacttgataggacttttgcttagttgaatctttagcaaatctcttttatttcttgggattttgaaggaaggtaatttttaaaggaggactagaaactaaggtggatttggggaattggcctttttagaattaaaatttcccattacaagaaaaaaatcctgtgtctttttttccagaatggagtaggtcagtgagcaatgtgattaataaatatttcaatgtctgtgacttttgatttattttggagacagggtcttgctctgttacccaggctggagtgcagtggtgctatctaggcttactgcaacctcacctgtcactttttaattgcaagaaagctgaaaggtttttttctattatatcagttataatgagaaatactgtatatactaactatgagtaaaatactatattgcctaacttgtattattaagcaattctgctaacctgtgaccttacattttcatctgaaaagcaggggctggacaccaattgccctatgaagctattgctagtcctaacattctttgttttgtttgcttttttggcacacttaagtgtgtactatgaagtttatgatgctttaatgaaattttctgtctctaccattgtaatgagaaaggaataaaatactttattttgcaaatctacttatggaatatagttctgtacctgattgttttcataatccctgtgttgatgtgtaatgccacagacatgctcttgatggtaacaggaaagaaaatcagacacagctaaacataaaggtcagttggctggcaggtgcttagcaggtgtaaatagaggcccattcatgctgctccacttgctcctgaaaagcataatgtaaatacagtatactaattaggaggcaaagaaccatctaacatggttctttttttttttttttttttttttttgagataaagtcttgctctgtcaccaggctggagtgcagtggcgcgatcttgactcactgcaacctccgcctcccaggttcaagcaatttccctgcctcagcctcctgagtagctgggactacaggtgtgcgccaccacgcccagctaattttttgtattttagtacagacggggtttcaccatgttggccaggatggtctagatctcctgacctcgtgatctgcccacctcggcctcccaaagtgctgggattacaggcatgagccaccgcgcccagccctaacatcaaattttaaaagagttggccacagtttaatgacatccctgcacaccagcctccacccatactgcccttcataagccccttaaaggagatcccatagttctaaacccgggtccacaaacacacatatcctcattctctccttttcttctctttggcagtttgacaaaatctttagggggaattggaggaaacattaatctcctaaatcaacttcattcaaagct

SEQ ID NO: 415 - DNA, 31737 bp, Homo sapiens
gccctaaccaatcttgtaataactctgtggtagttaattttatgtcaaattgattgagctaaaaaatgcccaggtagctggtaaaatgtttttttctgggtgtgttagggagggtgtttctgaaagagatcagcactggaatcagcggactaagtaaagaattcccaccctcaccaatatggtgggtgtcatcaatccactgagggcctgaatagaacaaaaagcgggcagaagggcaaattccctcttcttcttgagctgggccatccatcttctcctgcccttggacactggagccccttgttctccagcttttggattcagactgggtcttgcaccattgccctccatcttctcctgcccttggacactggagccccttgttctccagcttttggattcagactgggtcttgcaccattgccctccttgatgctcaggcctttgaatgcagactggtctccaccagcagcttttctgagtctccagcttgcagatggcaaaccatgaaacttcatggtgtccatgagcatgtgaaccaatttctattataaatctgcaatatatatatatgaggagacttatttatatattggttcagtttctctggagagccttggctaatataaagtctatactctacaaagtgccctaggtactcagggagtacccaagtgtgtcatgaccagcccgacagccctggctgctggcttccccgcacacaactctgcacgctgccttcatcagcctttctctctcagctgaaccgagggcattgaagcgggcctctggcactgtacctatgagggagcaatatcttcccctacactgacctcttccgtgccgagatgcagccctccctgctgccactagttacagtggtccatgttccctttcaaagtgaagttttgataaaagcacctcttaaccaatgccaaatagctaagtctgggacaaagattgcaggtattttgcattttccatgtaacctcagagggattgccattcacactgatctgagctgcagaataccaggcagccacctcacccacccagcaggtccactcttatactttctcagaaagcacagccactctactcttattcagttgaaaagaatttccaggaaggtgtttctgcgattgcctcagaaaagtcagttccctttgggaatttcccttagggatcatctgtaactccatttctgccttttacctgaattctttggtttggtttgaattctttggtttaatttatgaattccctttattacttttctctgaagaaatggagatatcagctgtccctccccactgccatttattccttccttcattcaaaccttatgtggctgctacttaccgtgtgttaagtgttcactttttttcttggaattcaaaaaaagaaggacagtatttggggcacagatcttttggtgttctatacatttttttaaagtttcattttacatttgtgtgtgcgtgtgtgtgtgtgtgtgagacagtcttgctctgttgcccaggctggagtgcagtggcataatcattggctcactgtagcctcaaagtcctgggcccaagcgatcttcccacctcagccacccaaaatgctggggttacaggtttatgccactctgtctgacctgaaagttttgggtttactttcccttctttctctttgctgaagtcagagatgatggcagcttccagattctctggtgcctgtgctgggctcgtgctggtcatggtcttgggtccaggattcattctggagactctcagggaagtttcccatgacaaggaaatgtaggagagtgtgctggctttgcgtgctcctctgccaagccctgcttctcctggtgggacacactgaaccacagccagggcattttggtggttagttaaaaaaaaaaaaaaaaaaaaaaaaaggaagaagaaggcactgtgtaattgtgccggggatcttcagaaattgtaatgatgaaagagtgcaagctctcacttccccttcctgtacagggcaggttgtgcagctggaggcagagcagtcctctctggggagcctgaagcaaacatggatcaagaaactgtaggcaatgttgtcctgttggccatcgtcaccctcatcagcgtggtccagaatggtaaggaaagcccttcaatcagggaagaacagaaggggagattttctttgatggttgtttggaagtcaggcttaaacaattgtgtctgtgtgtgcgcatgcacaaacacttttaccttatctttattttcttctttttatttgaatgtatagggttgtgtgtatttctgtgtaaatttggggttttcctcctcttagtctttcacttttgtggtgattaccagtcccatttttagagccagggctgcaacttgaaggttttgctaaaaccctcaccgaagtgtctatgatcagcattttaactattaattaatgtggccaggcaaggggtggaaggtgagaagactagaaagggaacatgatatacacatttactcagatactgggcttttctaacatctgcagtgcaattgaagttaccagtcatctgcagtctaaaaagaaagtgattttgggaggtgcgtagaaaaaatcatcttattatttttcctctatattacttttttcttttttttctcctgaagaaacttttttttttggtgataccttctttttctctagcacgtataattttggaagcatttttcatatgcagtgtatacttcagaaagagagagagagagaggaaaattgtcctgttcagcgtttgcatttccattattcctgctattagttaaaaacaacaacaacaacaacaacaaacaagcaggatacctagatctggaaaagggagaattgtgtagagctgtcttcctaaagttctgagttaggactgcctcagaccactttcataactatctccagtggctttgtgttttatatttattaagatagagaaaaaaagagtaattactaagggcagctgctgtagctttatggtgattactgaacattgacatgctgtcacgtttttggaactttgagtatttaatcactttgggatattctattttcccccatcttgagtgtggacagatgctggtgatgtagccttctgggcacagagcaagcctccccctcagcctctgcaccagaaaggctcagcttcacacactccaagtatgttttctacaagaactacactttgtggctttctgacccaaacatttttatactaaattacacacaacaaagttgtagctcagagagggaacaaatggcttatttaggccaccattttcttgagccattatgatttcacacagggctcccttggccctgtaaattggcaaggattccattattcaacccgcatacatgtacagagaccctgctctggcccagatagtattctgggtacaggcggatagagcaggaaacaaaacagctacagtgatggacaggtcagcctgcagcaatgcctgcagtctctgcaaaggtagctgtatgggtgggcaggtggctagcacttattcagctctggaaggatctcccctctggcctctcccctgacacccatcaataaaactgaggagcatcggtggacaggggaccttgtgccccctccctgcctgtgcagttggggctgaacccagctacgaagtttgagctcactctctccagctccctctcaattcagagctgaactgtgggaagcttcagagctctctgtttcaaggacaggttctcctcacctctcctaatggaggtgcaccagggaactggccctgctctgcccagggctttctcctggactttgccatcatggtctagcaaaccctgttcagattgaggtgagtggtgagatttcgaattctttttgacagataggattaagtcttcttctgtgggacaagtgggaggtagaggtaagattaaagatggccaaatgtctgagtcctgacagccacaatatggagatctagactttttacagaccacagggcacaggggcctcactaacagagttcccggaagtgatgagtgtgctgggggcttcctggttgaagagacactagaatggaccagctgggagctaattttttgggctggagtgtgatggcctgcacatcactgcctctgtccctccattgtcacagctgccccttaggagccagctgaggcaatttgtggtcagagtgactttgcacagttgtcctgcctgtgttcaggaagggagtttctgtggtccctttgaaaccacagaagagcccctcgtatagctctcaatggagggggcaaaacattcaaataactcaggagataacacaactatttgtttttaactgtgagtttttaggcaatcacaaagatccagatgtatgtccaagcctctctttgcaattctaattaacctcaatgttgcaaccatagacctaccttacagagttcaaaaaaatatgcaaaaaccctgcctttcttcttcctcataccccaaaatgccattctgaacatttcctgttagttaaaaaaagatttccatggtgttaccaggcactgtacacagtctgtgtcccaagacaaggaggtacagttccacatgcgcccatgactgggttgggctctgcactctctctatactttgagagcctgattttctgtgattgggcagagctggcccacctggtgcaatgtcctcctctgcctttcaaacatgttttagtcatcaagatcttcaaatttgtaaccctttccagcttgatccagcagaatgcagatttggaaaaacagaacgagtttaaaatacatgattctaagaaacctggaccagaactatcaaaacttggtttcccagagaatatagcaaatgggctcattggccaatactatgacattggcttttgagaaaagaaaggctttattgcaaggctggccagcaaggagacaggagttgggctcaaatctgtctccccagtttggggcttagggcaagttttaattacacagacgcatttcttatgagtagcaggcagagagcctccaacttcttctgcctaggtaccagcagcttagacatgatgcaaacctgggaagcacatactgtatttggagaaagtgattgggaagaaatgtgagctgaggggaggggctcagtgcccctgagctacacttagtgatggcagaggaaggatgtcctcccgcaggaggctgttccacatctgctctggttgtagggggagctggcaggcattagcagcggcctctttcccccaagagaggcagcctcctccaagttttggcgacattatggccctgcaatcataagggtttgtgagcatagtgctaaggagggaaatggagctgctgttactagttccaccccaacacacacacacacacactcacaagaaacctcacaagcaccgtattggaagactttgccatccaacctgggatttgacaggctctagaagcagaatcatagactcatgaagttcccccaaagcaggaatcttccttacagtaacccccaaccacccccctccaccgcctccaccggctgcttcttcctgaacactgcagtgtttggaaaactcacaaacttccaagcttgcctttcctattgttgcatggattgaaagcttgcgttgtgtgaagaatggcgcttcctgctgtgcttagttttatctcatataatctttgcaccatttaatccttgcactcacccactcatgcaactgcctttgcagagactggaggggccgctgtaggctgacctttccttcactgtacctattttgttccctgctttattcccctgcacccaggacactgcctggcacaaagacaggtctttataagtgtatgcaagtgaataaagatatatatattattattgttatttttgagacagtttcactctgtcacccaggctggagtgcagtagcgcaatctcagctgactgcaacctctgcctcccaggctcaagtgattctcatgtctcagcctcctgagtagctaggactacaagcatgtgccaccacgcccagctaatttttgtatttttagtaaggacagggtttcaccatgttggccaggttggcctccaactcctgacctcaagtcatcctcctgcctcgacctcccaaagtgctgggattacaggcatgaaaccagcctagaaatacatactattatttattcttgttttacagataagcaaagtgagtcatggagaatttggttgaaagtcccaaggtcaggagtcgtgaagctgggattaaaacctaatcatctgactttagagagtagacacttgctccatgcatattgcctccaattcattcattcaagcactccctgctcaagaagttctttcttatgttgagctgaaatctgcagccctatgcgttttacccagcagtcctggtgctgttccctaaaatcacttagactgtgcctgctctttctgtgtttacagtgtcagctgtaatatccccctcttcggcctaacgtttctgaagtcccttgccactgggtctcctctcctcttcctgtgttctttctaagaacacctatgcagataggtgtcttctgtacagggaagctgttcctgagatccgggcatcgactctgttagaataatctacgtatgagttatttttttgagaactatgtgtcattgctgactcatattaactctgtggttaactaaaatctcaagatctctttatgtttgttgagaaacttatttaacttctctggccctcagtttccttcactgagcagtggagtgattgataacctccacctgtggttgctgaaggtcttgcacaagatgatatagttaaagtagctagcagtgcccacgtacggcggatgcctcacaacggtttgcagccatctctctatctgtgtctttgtctctctctcacactggttttggcttactgttagcagctagccgagataagtgtgtttatggtctttgcatgcattgtttctgtagcatactggaggattacaagaggttggggagtgagggggcggtgaggagtagacaaaggcagccaactcttccaagtttagcttagaaggaaggagcggtaaaccctagttgaatgttggactgaagcaggtttgtttttgttttgtttaaaggatagggaagatctgtgcgtgtttccaggataaagaaaaggagagaatatgatattaaagattctggaagtgggagaaggagcaatgaaatacagacttgaagtcagtggcatggacagggtcaagatcacagttagaggatgcagccttagagaaaaggaaggggctcggttctctgagcaaggagggaaagaagagaggcagatgcagagaagtacggcacatcgtgctgctggttgtagaaataacctctgacttttaataaagtcatccctcggtatccctgggggattagttctatgacctccctcggatgccaaaattcgtggatgctcaagtccctgatataaaatggcatagtatttgcatttaacctacacacatcctccatatcctttttttttttttttttttttttttttttttttttgtgagatggagtcttgctctgtcgccctggctggagtacagtggctcgatcttggctcactgcaagctccgcctcccgggttcatgccattctcctgcctcagcctacaggtgcctgccaccacgcccagctaattttttttttgtattttttagtagagacagggtttcaccatgttagccaggatggtctcgacacatcctccatatactttaagtaacctctagataatctctagattacttgttttgtcttttttttttttttttctttttgagatggagtttcactcttgtcacccaggctggagtgcaatggtgcatctcagttcactgcaacctccgcctcctgggttcaagcaattctcctgtctcagcctcctgtgtagctaggattacaggcccctccccaccccccccccccaacaactggctaatttttgtatttttagtagagatggggtgtcaccacgttggcctggctggtcttgaactcctgacctcaggtgatctacccgcttcagcctcccaaagtgatgggattataggcatgagccactgtgtgtggcctagattacttataatacctgatagaatgtaaatgctatgtaaacagttgttatactgtattgttaaaagacagtaacaagaaaaaaaatctgtacatgttcagtccagacaaatggttttctgttttttttttttttttttaatatttttggtcagtggttggttgactccaggaatgcagaacccgcagatatagaaggttgattatgcgttcagaggcagggaataccatcttgggttccagaaagaaaatgatcagcattttctgtcatactctggtaaaaacagatcttttgaatggacaggtgtattaaaccctgtggagctggctgggcctggcggctcacgcctgtaatcccagcactttgggaggctgaggcaggtggatcacgaggtcaggagttcgagaccagcctggccaatatggtgaaaccccaactctactaaaaatacaaaaattagccgggcgtgatgacgcatgcctgtagtcccagctactcgggaggctgaggcagaagaatcgcttgaaccctggaggtggaggttgcagtgagccgagatcacgccactgcactccagcctgggcaacagagtgagactccgtatctaaaaaaaaaaaacaaaaacctgtggagctgatgaaatcctgcagggagcttcacggtgacagcaagaggagaaacacatccccatatgccccgcagagtttgaagtcccggctgcacctctccccagcagcaggttgactctggaaagttgcagcgttcttacctacagagtgggaacagtactacccattgcacagagtgggtgcaaagctctgtgacggaatacatggcaagtgcccaccacattgcctgggatgaggtgggcccttcctttacgtaagagagccctacagatacactcaaagtgggcacattcctacagaaggagtgttatttgtgtagaaaagaaaaacatgaaaggcttttattcctatacacaataaagcacccctttaatgtctttttgaggaggataatatgaaattgatgaaaaggaaccctgtggttggatccctgacaatcacatgtatcccttttttcactcttgaaaaaggagtaaaggaataaaatagaaggggagagggggcagagagaccttcaccgccccccccccaccccccatcatccaatctatagtcaaaccctccagactgtgtctccttggcatctctgacacccccaccgccaccaccccagtcaattcctatcttatccccctatcctggatctgattctgctaagttcctgccacactaaagacagggtggctttctgatgacaacattcctctgcttaaacctgtcagtaattccttgttgctctcagacggaactaagttctgaatttcttcacacggctctcagcaaggtcacagtcaccctgctaggccccaggggcaaatctcaatggtcatcttcttgaagacctggctcagttatttctttctcattgaggctcacgaccccaccttcttgcatgcctcaaacggccccttaccatgctcttctttcgcccatagctcagcacaccgtatcattttaatttatgtattttgcttaatgtggatgatctgtctcctcctctgctgtcctcaccagagcatcagttcctcaaaccaaggctctttgttttgttcttggatgcaagctaaatgtctggcatgtggcaaatggtcatagatacatgtcattgaaagaatgattcatcacctccctctttggccttgtctgtggttctaccaaatcccattccctccccagtgccctccattccccctccttggctgaacattctgaaccacagacagttctttaccctgaacctttgcatattttgttctcttagcttagagcggcccctctccctccgtctgcttggctaatttctacttgttcttcagattttatcttagatgtcattccctcaaggaatccttctgtgactcaacatggaattaagttgcctcctttgaccctgaaagcaccatgtactcaatctcatcttggcatgactcactttgctgtgtggaatgtctgctttccttgtttgtctattcctttagactgtaagatcctagaaagtgggggccgtgccttgctcatgactgtgtttctaacaccaaacacagtgttcagtagagagcagctgctgagtacgtttctgctaaatgacagttgatggaggacatttagggttgcttggaggtcaagtcaaggaggcatttaacattctagtaaaacaaggaagtaacaggctcctgaacatgcccacaatgaaccagatgcaaaccttttcccttggcaggattctttgcccataaagtggagcacgaaagcaggacccagaatgggaggagcttccagaggaccggaacacttgcctttgagcgggtctacactgccaagtgagtcctaaccctgatgttgctaataagtgggggcatgggcaggggggcctccttctaggagtgatgaccacccttaataccacatgtctgtctgagccaagtttctgagcgccagggaggtgaggaaggttggacttcaccagagaggctttgtggacaccctttatcatcttagtgagtgctagtgtcaaaacaaagggagtggggatatggggcacattggtggagggaggtgtgatctctgcagcttcagaaagatctgaaagagtcatttggttagagaagttgacctatttcctgtggggttagaccagggttgctactgtgaacaccagccatgactcaccagtcaccttcagaagccacaggcaggacatgctgacgacagccttcaactcacccaccccttgctcccctgcgggtggaagtctggaggtgacaccactgcattttctaacacgggggctccttgagcaactagaacaagaacagaaagaatggggacattagcaggtgctttccccctctctcattcttttctttgaataaaaaggttgtttgaaaacacctgagcggctcctaaagatgggtgcaatctattcgggatgcaaatccgaatgaatgttattcaaatgctcctctcttctttatgcagagtgtatttcaaggctcagccagtggcaggcatgctggggactatggactacggactaggggcctgtcacagaggaaggcctcatgctagagagctaagggaggagctggccttcagttccatcccaggagcaactttgatgttcccagagatccttccaaagggggagtcatggtcacccaagaaaaatgtattcagaatgccaagaatggtgcaaactcaggacaaagattcacactgcagggttggagtccctgggcttgctgctggcaccatgggagggagggtccccttcaggggtaccgttggtttcctgtgaattaaactggcttcaagggatctcgactgaacaggcctatatcacactcactgatatactctctcttcagtccttctcctcatctaggtatttttaattgtttcagtgaggtgtaggcatgaggggattggagggggcatctcctccattgcagtttttcattggctgctttgctccctcagctccgaaatcgctgggccactctcgaacgcattagtacggtagtcacaggttgattgcctggccccttgccctctgtgggcattttccctttcagacagcccctgagtactcacagtgctgctacagtgggccacctagatctccctctttctccatgctcccacgtgctctgggctccactcccttctcccaagcacttctgtccagggctattccagcagtctgacctcaaggaaatcctttgctaaactgattatagagaggtttctattttaacatttaggccttccatgtattaattctcagaatcaatttaagatgtttaaaggtgtgatttaagacattttaaaaccatttggaggagagtacagaaattatgtcacttgctgtcagcctctttgcaccatctgcagagaaagatactagagtcccgccttggacacatccacatgcaagaggtgcaaagaaggtgtctttgatgaggcaaggtcaaaacttctccccagacgaaatccaaagaaagcattcctactatgctatatcagtttggaaagaaaaacttctgccaggtgactgcattctcactggtcacattgtgttcctatggactcctcagctcaaccaatttggagaagttatggtgcaatttcaccatatctggttagaagttaagtttccaatttgctggcaatgaagaagaaatggagcaggccaggctgtgtagtttctgccacgtgcccccgggagtgaacagctctgtttgtaagaagccatggtgcttagacctgggctcgctagttgccagcctccaaattgcagaagtgccctttggttggtggctatgctgtgtcacttgggaaggtcgtttggaagttccacagtcgttgtggggtgccagagattaaaaagcgtaagaggagagtggaaagtgattgttgctgcttgggcatccccaccgtgtgggtgctgcagcccagctctcaaaacccatgggtctgtacactcaacctccatgagagggaaggagaaggatgagggaggggagagatagccatggaaaggtaggaactaagcaggcagggtggagagttttctgtaagacaaaaactgtctggacactgctgcggttctgttacaaagaccacttcctccctgggccagcaacatatctgtgtgcctgtctgggttgtaaaaagggtcaaagatcaatgcagcaggcagctacatgctggcaaaagccagaggcagctggtctgtttgcctgtgccaggaaaccactgggaatggggttgtgtgttattctaggagaaagtcgtcccagcagcagcttctccaggggcatccaagagcactgaaaagggttgcaagatgacccatgaggctgcaggaagaaaagaacatgcatttaatcttgctatctgaaaagtaagacatgaagctttcctcatttttaatatacacatggacagtagtatgtgtatatagtttatatgcaaatatacttgttataaggttgcatgctcaaaatttttggttcatggggtgtgggatcataaatgtttagggaccatggctatcaaggaaaaacagcatgaaggataaatgatactggcggattaaaaagacagatgcatgtatttttagcataaaacacaactgctgactgatacagatagctcaagattctggggcagctgctgaacagatacactagccagtgtggctcatcggctcagacttggccttaattaatgggctgtccctccacccatctcccatgagggcagagctgagccagggtttgagagctaaaaggaattggacctggactctgttcacgtgtatattttaattctaattaattcattcttttgaaagacagagtcacactctgttgcctaggctggagtgcagtggcacgatcttggctcactgcaacctcggcctcccaggttcaagttattctcctgcttcagcctcctgagtagctgggattataggcacatgcccccatgcctgactaatttttgtatttttagtagagacggggtttcaccatgtcaggctggtcttgaactcctgacctcaggttatccacccgccttggcccctcaaagtgttggaattacaggtgtgagccaccgtgcctggcctgttcacatgtataaaacacagtttaatgtcctattcccagccaatgagcatggctagagcagccttggtcaaagtttggtttttggagaaaaatccttgttagctgacctaagattcctctttgtgagtgtaagtaagcacaggttgcagagaggagaagggtctctggagaggtgtaattttctaaatggattacaagttcatggacttttaacaggtgttacaggggataacaagttctttatagacagacttttgaggacgtttaagggtattctgattcttggttttctaagaggggaatgtattatttaactacagacacccctaccgcccactttttgcagagtgtatcaaaacatgtttttggaataccaccctcatgtcgcttctccctgcatctcttatctcttggtgtccattctagactcactttctttctgttttttatttttatttttttttgagatggagcttcactctgtcaccaggctggagtgcagtggtgcaatcttggctgactgcaacctctgccttccgggcttaagcaatttttgtgcctcagcctcctgagtagctgggattacagcatgcaccaccatgtccggctaatttttgtatctttagtagagacagggtttcactatgctggccagcctggtctcaaactccttacctcaggtgatctgcccgcctcggcctcccagagtgctcagattacagacgtgagccactggtgcctggcctagactcactttcaagtggcatagacttgtaaaattatttaaaggtgataggtctacaatgatcctgtcaattagtattgacactattattaataaactgttattaattatatttacttactttaaattaatccaaactaattaacggaacactaaagagtttctatgttttattcccagaggtggagaaaaatgaaagggaatatagcaacgaattcttttctccataaaaacatgaatagtgcagcacatcaagttgaacataccacagcaaattgttgcaagatctgctgagtagctcctatttagacctcaaggaatgagactcaaaatgggttcatcagttctgttttgcagaaaaaatagcgcaaaatttctcaaaagaaaatccagaataataataatttgtcaataggaaagacatttccactgggggttaagaaggaagacattggaacaatgatagccaccacttattgaatgcttactgtgagccaggtggcacttcaccttgtttcattctcacaacagtctagggaagtaattactaatgtctccatccacctcttgtagatgagcaaattgaggctcattgaggctaggaaatgcacccacactcacatagcccataagaggcagccatggcattgggcccagaccatgtgaacttcaaagactacacgagcagccactgggcagctgtcatggctaaagccacttgaattcagcccagcagcaaccccctctccaggaggggcacataagcttgcagctttgggtagaagctgcacttgaagtcctggatggcgagagggactggcttgagccagagccaggaacaaggctctgagaatattctggaaatccacaggaggaacccattttcttacagctgggagaatttcattcaactccaggctgaccatgttttattaggaacgaaggtgacttgaactaatagtcaggaatggttgaatacggacccgatgtcaaatcactaggcagttcacatttctaatgagcaaatcccttagacaattaagaatttttttccttttgcataacccagacaaaatcgctacttaaaaacaaaccaaagacccgaaacatgagaaagagaaggaagcaggggaaatctttggtactaataagtttttaaacaataagagcaccagatattttaccccatcagacacagaatgttattcgaataaccaaaaaaggaattttttctctaagtttcttgaactggaaaatgaatcatattttctcagtcctgaggctgcaattttgtgcctctagtaacatataagaatagatgtgatgccagtgcccagtagctgctgcaattgttacttggggacctgtttattcactaagcacttcaccccagtgataaatttgtaggggcctcctgccctttggagctcctaccgtgtccattagatcagtggaaattctgggattcagagcactttgcaaggtcagcaggggtctgctctttctgtcctgttcctggtttttggttgtgcctggattccagggtaggtttctcatctgttaccttcatagacttctccagaaaaggatcttttgaccatcagaggaccacgaagattccattggtgaggcgcagataacctgatctctctgggttctctgcagggcacagatgaagggctggccattcccaagttctcagtggtaccactgaggcatgagaccctaatggtttgcatgagcagtttgaaaattgcatctttgtttttacctatataatcacatgaaacccgtggttctcaaacgtcagcaggcatcagcatcacatggagggcttgttaaaacagatttctgggccccaacacagagttttaaattctgaaggcctgaggtgggcgtgaacatttgcatttctaacatgttctcgatgctgctgccgccgctggtcccgagagcatgcctggagaactgccaccttcgaccatggactgtgagaattcacatggacctcagaattataatcagtctctcagttttacagataaggaaactaaatccagagagattgttttgccaatggtgaacagctggttaaagtcaggatggagactttaatcctagtcaagtgacctttcctctgtatttatttccctccctttttatgcctctcaagtctagttacactgtttttcatggatgggcatatttattgtcctgatctggactgcagacttctcaggaggacacctatgatttaatttagtatagttgaagagttaacagacatggctttggagacagactgattatggtgtgaatcccggctttgccactccctagctggatgaccctgagcaagttattcagcttctccaagcctgagttccttattggaaacatgagagcaattgtgataggcagaataatggccccctcaccaatcatgcccacatcctaatcctaggaacctgtgaatatgttatgttacatggcaaggggaaattcaggcagctagccagttggccttaaaataaagagattatcctggatgatctgggtaggacctgatgtaaccacaagggtctttttaatgtggaagaaggaggcataagagtagatgtcagagtcattcaaaataagaaagatttgatgggccatccctgactttcaggttggaaggaggttctgagtcaaggaatacaggtgacctctagaagctggagaaggcaaggaaatggtttctcccctagaagttccagaaggattgcagccctgctaatatcttgactttatagccctttgagatttattttggatttctgacatcctgaaccatagtaaaagggtgttttttgtttttttgagacagagtcttgctctgttgcctgggctggagtgcagtggtgtgatcttggctcgctgcaacctccgcctcccaggttcaagtgattctcctgcctcagcctcctgagtagctgggattacaggtgcttgccaccacacctggctattttttgtgtttttagtagagacagggtttcaccatgttggccaggctggtcttgaactcctgaccttgtgatctgcctgcctcagcctcccaaattgctgggattacaaggcgtgttgttttaagccactcagtttgtggccacttgttacagcagcaagaggaaactcatacagttatcatgtgaactcacaggaatatggtgagttaaaaagagaggaagggtgcaaaacatccacggtagagtgagaactctccagggagtgaggactgtgcccagcatacagtgatcaccctcttagtaagctaagtttctgagcaccagcttttttgagttgactttgttgtctttaacatttgaagatcacccttctttgctcagcctggcttgcagacctgggctgatttgtggatctgatagaaaagtttccttagttgggctcttctccccgaccacccccatgccagtgtggccacatcctctgtctgcattgctcactcttcaattccaagaagcgcaggggcaccgccaggaacaggaaccctgccagaggaatacatcaagaaaccaagtctcccttacgcatcaccgtaggaacagagttaatggattatgaacatgtgtttgctttataccattgtttgtttcccaggtggcagctggctgccccatcttattgggtagatgtaagtggaattacgaatgggatttatgtttcatgcacgatggtgattattaacttcaactttcaggtaattttcagaccacattgcactaacttggtctctgattgtttttctccttgtttgtttattctgcagccagaactgtgtagatgcgtaccccactttcctcgctgtgctctggtctgcggggctactttgcagccaaggtaactcagacttccctttgttcattctccttctataaagtgcatctcaaggaggttcaaagggcaggctttttgttgaaaggactttgcctgacctctggctcccatctgtgaagccctggagaggtgagagccctcgggaggccgtgtttcaggcatgctctgcacccgtgcagagcgcgtgtgataatgcattgctaatgcttgctccctggtggctggctgagagctgctgtgctgacaagggtggtttaaggctaaatgtgactcagaatccttaagcagtgttagttcagatacaagggcattataaatgagagtgcctgagggatctattttgggaccgctgtcacttggctcttctgctaataagcttccagtgtggtggccctccttcaggcatgtttccactgagccacgggctggatgccacatccccggccttcccacagttatcagcagcccacaggcttgacttgagcaagttggaaagacaaatcaacttccagagttgatttaacattgagtggaaatcagtcatacttttggtcccctttcggggccacgcctggcactgtgcctggtggcagatcggcatgaactggccagcttctgtggccctggagggcacaggcagaaaggccacactcagtcccatgatgaactgtttaagacttattgttgtctccccgctctgtaaagtagatagagtggattttatgtcccttattacctttcaggatactttgactcagggagataaagtaacttgggtacagctactcagctggtgaagaacacaggcagaatgagtgcctgggtcttttgacttaaaattctggatttttcacaaagatcctcttactttattcatttacataataaatatatattgaagagctactctgtgccaagccctgtgcctagatatacagtgataaataaagagtagcttctagaggtcacctggcggtgaggcacaggccagctggcaagatggaccacagaagtcagtgaatgaagacaatgacaagggtgggaagcgccatatgggaagagaaccaagttcagtgatagagagcagaggtgaggcggcagcagaaaccacttaagggacaccacgtggcactccttctgtgctgagaaggctgtcagtaagctcaccatttatttcctattttctctcctgagttaaataggaaacatgtctcgcattacttgaaaaatcaagtcaaactatgctcttactaggagttatggttctttttatgtcttagatgatgcttgatctagatgaatgcggacttgctgtagctagataaatacaatgggagtttgaaggtgtttcgtagccctggaaataggtatttcctgtcaaaacaagctttgtcattgccagcagacaaaagcatcagtaaccttggttgataatcgtcatttcttaggaataaagtagactgtagaattttttttagcagaaaggaaacccaaagataattctagtgcaaatccctcactttatagagcagaagctcaagtcccagaggaacaagtggcttgaacgaacatcagaattttaggggctggatttgtaccctcctggtgccagcagcccacttccctgcaggaggcactcaccttccttgcacaggggtatgagtgtggccattttccacccataatctctgttagctcatgttcaattgggttcccattgaaagaaaaatggaccagtaagttggagcagaatcattcagatggtataacataaggaaaaactttgcccaaggcaaatcgtgattgtgacagctttgtgatttttagagaatagcatgggccaggcacagtggctcatgcctgtaatcccagcactttgggaggccgaggcaggcaggtcacttgaggttgggagttcgacaacagcctgaccaacatggagaaaccctgtctctactaaaaatacaaaattagctgggcgtggtggtgcatgcctgtaatgccagctactcgggaggctgaggcaggagaatcacttaaacctgggaggcggaggttgcggtgaaccaagatagcaccattgcactccagcctgggcaacaagagtgaaactccgtctcaaaaagagagagaaagctgaagttcacagtttctcttttgctttgattttcttatctgccggataacaatagtattttggaaggcaggaggaattgtggaaagaaatgggttttggggagtggctgattggaggcaaatccaaggacactcattgctggtgtgtgactccaggcagttactcagcttttccaagcctcagtttccttattgtaaaacaggaccatggtctagctagtagcattcctatggtgagtgaaataatatgtataaagctcctgacacagtgcttggcatatatcagattgagccatgtaaaactgccaatatctggctatttatgacctacaaaaatagcatttcatatgattccacctaacatctgaagcgcaataaatgttattattgataatgcaggtggtggtgataaagttttgaaatcagaaagacctggcttcaaattccacgccttcactggcctgacttattttcattcatttgacaaatattattttgaacacccctatgtgccaggcactatgccaggctcagagatgatctaggaaaaagacagatgtcctcatctgtcttaggctcttgtggcctaagcctaaatttcctcgtctgtcaaatggtgacagtaacacactccttaccagagagctgggaggattggagactcaagttcccaaaacgccaggagcactgcggcaggtgaaaagtattccctcaatggcggaagtgtttaaattgcttttatatctgtagctctagataacactagttccagcttagttaactcccagctccaagccttcaggacttcatagagttattggggtgctgctcttggcagtttcccaaaaagctagaatgcagagggaatctccttcccaaaaagctagaatgcagagggaatctccttcccaaaaggctagaacgcagagggaatctccttcccaaaaggctagaacgcagagggaatctccttcccaaaaggctagaatgcagagggaatgtccttctcttctaaatggtagctgttagttcaagaaaggttaaacattgtgctgtggggaggctcaggggtgaagggtgtacttttaagagaaccagtttcagagctgggtttggggtttaagccctaccctctgcccccttttacgagctgacagccttatgcaagcctggttgaccacctgaacccacgtttccacatctggaaatagaaatgtgggtactagttatgttgaaaggactcaggttagatgatagatatgcaaataccttggaaaccaggagtgtccagtcttttgggttccctgagccacactggaagaagagttgtcttgggccacacatagaatacactaaccctatcaatagctgatgagctaaagaaaaaacgttgcaaaaaaaatctcatatttttaagaaagtttatgaatttgtgttgggctgtattcaaagccatcctgggccacgtgcgacccgcaggctccgggttggacaagtttgttgtaaacaatgccatgatgccggcataaggtcgttaccagtattaggaaggttctcaggtttcctctagcccttgggctcttttcctgaagtgcgtgtgtcttctgctagattttgtgaccaatgttgattgcctaattgggctaacagcatgttttggtggctacgaaactgacacaggtgttttcatttctccacttagttcctgctgcgtttgctggactgatgtacttgtttgtgaggcaaaagtactttgtcggttacctaggagagagaacgcagaggtaggtaactgggactactaaagaactgtggagcgattcctgatttttgagcaggaagagtgacaattcaaaacagtatttgactagattcacggctccgtagcatccccttgggtgggagggggaaggctgactaggacctctgattcttctctccctgagctttgaaggctctgaaaatacagctggggggacttgcccagttttcttattaagcaattcctccgcatggtgctggctttcaaagggtgcttcagtgctgtttgctgcacgtgccttgcagccccacaccctgcactcccgccctgcagagtctggcgctggaatgacattttaggtctgggttcccaggcctcctgagagtgaaatgtttcattgtttgtctagagaaatgagaactaaagcttgcaccttgtgataagttgtcctgaggaacatatctttcagggaccagaagaaagaatgttgggaaaataagatgcagtaagatgcagacatgacagcagggtgcagcggctcacgcctataatcccagcactttgggaggctgaggtgggtggatcacctgaggtcaggagtttgagaccagcctggccaacatggtgaaaccccgtctctactaaaaaatatacaaaacattagccaggcatggtggtgggcgcctgtaatcccagctactccataggctgaggctggagaatcgcttgaacccaggaggcagaggttgcagtgagccgagattgcgccactgcactccagcctgggcaacaaaagcaaaactccatctcaaaaaaaaaaaaaaaaaaaaaaaaaaagatgcagacacgagactgtgaaactgactagcatcaccattgcattgtttatagatgttgccagacagaaagccccaaagcagcacagtaccttcctgacatctggactaggaaatctagattttagtaaaatacatgctaatacttacagaagaaatgtcggcgttagagtatgccgtcagttccttagagattgcaattcctaatgcactagtatggtttcaggtgccaggaacacgttctgtgaggctgctgccccaggtgctgaccccagccttccacaccattttccttccttgtgttcacagccgctctgtcttttacaatagcacccctctctagtggctaatgggctctatgattagatagcatccttcagtagtgataaaggcagtgacatcctagggaggtcagcgggtgaaagcgctatatctggaaaacctgagagcctgtgaagctcaaggacttgacggggttagaccgtgagccgggctgcagctggaaaaagaatgactgttctttcagcagatccttccctgtgccatctctttcttcattcctctctagtggcattcttatttatcctctaaaaccacaattccattatctctcctattcttatcaacactgccctaaatgatattctttattctcttttgccctggaaaacctctatcatgccttttcccatgtgattacctcgttaagagtgggggtggaatgtctagcaatgaaataagagggtcttctcttttgcctggctccctatgcagccctatcttaccccctgcaaagtcccagggatgtggctcagtcactgctcctctcttcatctgtcaccacttgcttgagatcctacagctgctttaattccgagaccatctgcagaacatgacaaaatttgtccacctacccacatgtccttttaactttaaaggctttactaactgattcctattagggaatgaacagaggtggcaaaaataaacaataggagattgatttacaagaaatctttaaaatagtagatttcttcggacctcattgaaatataaatggcctgccttcttgtgtccctccctggtctccctctttaggtgataagaagaagatcctgccagccccataacccgccatctgcgcgggttctagacccccttctcctcccctctggccgtggtaggcattactgatgaatcatggtgctctttcttccagagaccaaacctggcctcggaatccttcttaacacagatactgcttaacacaaccactctgagcagctgtcataagtagaagtaatagatactagaagaaatgtctaagcctaatctagaccaaaatacggcctgatatagatgcaagccagaggggctttatggttaaatgcaaggagattttcaaccctgccgtctagaagctacttgctgagatcttcttcagttgggcccatctcctccccaggcctctcttctgttcctgggctatgtcacacttggactctgcagacacctaatgctcttgggacctgctttagttcttgacctcaccaaccgaggaggaattgctagatgagatccttcccccggaatttctctcttgaaccccagatggtccgttgcccctttccagaagttgctccagccctgtccgcttaggaagttcagtgtcatccttgatccagtgggtagggaagacattccataatgtatgccccagtctgagcttcttccttcaggcttcaggctgccctgcgaggattttgcagctccctttttaatgccctctagaagtttctggctcttattttcagcccttcatcctactctctctgaccccttcctctatcctgtttagttcacctgtagcagttactacccagcagtgaaggatgaatcttggtttcgtttcttttctcttcttttcttttttctcttctcttttccccttcccttcccttccctcccttcacatcacctcatctcacctacctcaccttacatagtcttgctctgtcacccaaactggagtgcagtggcctgatcttggctcactgcaacctccacctcttcccaggttcaagtgattcttatacctcagcctcttgagtagctgagactacaggtgtgcactaccacacccagctaattttttgtatttttagtagagatagggtttagctatgttggccaggctggtctcgaactgctgaactcaagcaatctgccatccccggcctcccaaagtactgggagtataggcataagccacccatgatgcccagcctgaatcttggtttcttccccattcatttaagctattacctgggcctgaactcaatggcacctggcaccaactggcaactgactcttggtcttttattacctaccttccctagcaggcactgggttgctccctcttcctatcccatggagtcctgtcctctgttggggctcctactgatcctcttggcaatatgaagttctcagctcaatggtgggtgggcaatgactgccaactcttgaggccaatgaactcaggttaccccactcctcctcctcctgagttgctcactcactcctcattcactcaacattgattcagtagatatttgctacctgctctgtgccaggtaccaggtcagttgctgaaggagtaacagtgaacatgacggagtctttgtccccaaggagacccaaggtgtctcctagagccaggggcacattgcaagaccaaatatattcaacttaccaaaataatcatagacctagttctcaaaaagcaagaagactgattcctcgttgtcatttctcctcctcagcatcaatgttttagagtctgtgggcccctccaagtgtggagtatggtgttacttcaccagagtttgaggagaaacattcttcttttggaaggccggggagcatagatggatatcaaggctgctgtttctaaaagcgaaacccaccaaacaacagtattagaatcatctgtggtgcttattaaagatacagattcctgggccccatcccagacttatgaatcagaatctctgccagaggaagcctgagaatttgcattctcagatgattctgcattctcagataacacattctttaggtgattcttacacacactggagtttgggaatcgctgaaggctgttcacttctcttttctgagaaatgattcattcatttcagaaatatttgcagaggtccttatttattggagatttgtgggtgggcagaggagaaatatcttgtcctcacagagcttacaatttttattttctttagaggtcaccaggcttaaaatgacacttccctaaattctgaaaagaacagatttttaaaacaagaagggactgtaatgttttctgttcctacctcgtattttgttcacattaagaacctggggtgggaagtggaggagggggggtgactggcggggggccacagagagctgagctggggtggtctcgaactcctgaactcaagcaatctgccagcctcagtctcccaaagtgctgggattataggcatgagccacccacgatgcctgggtggaactcagggctctggatgcctgggcgcccccatctcccacactacggcgcctcatcctagaagtggttagcacctttgagatgggaattatttagcaggatgcttttgtgttttcatgtaagttttatgctgcctgtggagggcacagctgtttcaaaactaataaccaaatcctggtctccgaagtctgaaggcatcctttgccctgcagtgcaaagcacgggattctggcctcacacaggcaggtctgaactcctgtgttgcctcttgctggctgtgggacctgaggcaaatcatgcaacctctcttttctgtttgcctagatggaaaataggtttacaatacgcccccataggatggctgtgagaattaaaggaagtcatgggtgtacaatacctggccccgaaagatgcttaataatttaattctgaccttcctcactcatttaggattatgtaccaacttttagaaacaatgaaagattagtgagtcttctgtggttggtataaaaaaaaaatagaaacatgaaagagatgtcctccttgttcaagggctaatgaccctggtgtgcgctgtctaggcccccaaggtcttccttccctgctcacagcatttcaggttctccgcagctttgctgagcctgggtcaggttcggtatctgcccaccatgctcacttgccacagctgtggccccatttccaaacttcagagacttaaaggtgcagctaatgatgtgcccggcctggggtcacattccctgagccctgcagacaagggagcaggaggctgagctcttatcttccacaccctgtgcacagcctgggaagagttaaagcaccctagtcctatgctgcgagggccacatgccctgagaccttggaaaaaatcctacctgaattgaagagcatcactatttcatcaggaggcgctgccatttcatttttcacttcggttttatcttgagtgtaaaacagcttcgcaaatcactttttcttgtttctgtaatgagcatatggtggcctcattcgtgtgataaatctgagccaccacgatatttgacttttcacaatttaatttatctgaaccctctattctctggctaaaaaatatcccttacttggacttctttattttattttcaattcccttaccagcactagcaggggactctgtactcatctgctggcgctgccataacaaagcactgcagcctggggggctcaaaccacagaatttattctctcacagtcctagaggctagaagtccaagatcaaagtgtgggcagggtcggtttctcctgcagcctctctccttggcttatagagtgccaccttctacctgtgtcttcacatcatcacctcactgagcatgtctgtgtccaaatctccccttcttataagaccccagtcatactggatgaggatccacccatatgagttcattttaccttaattatctctttaaacaccctgtctccaaatacagtcccattctgaggaactgagagtaaagattcaacatatgaattttggaagggacctaattcagcccacaacaccctcttttgggatgtttattttcccccttaaggagctagttaggatgtcttatctcatgaacatgactgtgaacaggaaaacagggagagaatgaagctggccaaggaacagggctggtgtcagctagcagtgcttttctgatgtgagtgggtcccacagggagcttgttaaaatgcagattctgattcattaggttccagagggacctgagatttcccatttctgacaagtttccagtgtgggggctgatgctgctggtccacggaccatactttgagtagcaaggagcttgatacataatggctgagtgactttcagactcctgctgtagaaaaattatgagttggctgggcgtggtggctcacgcctgtaatcccagcactttgggaggccgaggtgggcagatcacctgaggtcaggagttcgagaccagcctggccaacatggtgaaacaccatctctaccaaaaatacaaaaattagccaggtgtggtggcaggtgcctgtaatcccagctactcaggaggctgaggcaggagaatcgcttgaacccgggaggcagaggttgcagtgatctgagatcgtgccactgcactccagctgggcaatagagcttgactcagtctcaaaaaaaaaaaaagaaaagaaaaagaaaaattatgagttatattatcagcatatggggtgcctttcaaattgataaaatttctaatattaaacctgtggatgccaaatgctgctctctgattatggcaggaaacggcacttggcagtacgaagttagctgttgggctgagctggctcatcttgttgtgcggtcctgattgcctaaagatgccttcccaggatctttactaacaatcctcctgagtcatttggactttcccaacctgttatcacctctcagatgggccagccatggaggcagtcagaggagggctctgcagagggagggcagaaacagggtggcctctgcatgccattaggaggtcacatctcactgggggatgcagtttaggatttagtgccttggagagaaggatagagtgtattaaaacatgtctccgctaggcatggtggtttacgcctataatcccagcactttgggaggccgaggtgagtggattgcctgagctcaggagttcaagaccagcctggctaacatgacgaaacctcatctctactaaaatacaaaaagttagctgggagtggtggcgtgcgcctgtagttgcagctacttgggaggctgaggcatgagaatcacttaagcccagaagactgaggttgcagtgagccgagattgcaccactgcactccagcttgggctacagagtgagactctatctcaaaaacaaagaaacaaacaacaacaataacaacaaaaaccaagtctctccctccactcaaaaatgcaagggcctgtctcccattgctgggtgcccaggtctcatgaatgtagatatgaattattccagtcagcctcaggagaatagaatgagccctcagatgccgaagcacctttcagattccaccggttttatcggctcatttaaacttcacttctaacacagtcctgcattacacacgtgtctgtcgttatgggcagctgcagagagggtcttaatggtcctaatgctcagtgaggatgcccaatggtcaacagaacctgccatcttcaggccatcaaggagctctggagttaaggaaatcatgagagcacagaggggcgggtacagcagagccctcgtggtaatgggttttgaggtctaggctctcttcacttgggtttgaaataagttcaatgactagtaatagctgagacacttctacccttcaaatgaagtaaatgggaaaatggagcattgttgagtccagggagctataatttaaaccccatatatctaaaaggggtaacatttttgtgtgtgtgaaattggtgtcattcgcactgcatctacagttttctttttccttctcttccagcacccctggctacatatttgggaaacgcatcatactcttcctgttcctcatgtccgttgctggcatattcaactattacctcatcttctttttcggaagtgactttgaaaactacataaagacgatctccaccaccatctcccctctacttctcattccctaactctctgctgaatatggggttggtgttctcatctaatcaatacctacaagtcatcataattcagctcttgagagcattctgctcttctttagatggctgtaaatctattggccatctgggcttcacagcttgagttaaccttgcttttccgggaacaaaatgatgtcatgtcagctccgccccttgaacatgaccgtggccccaaatttgctattcccatgcattttgtttgtttcttcacttatcctgttctctgaagatgttttgtgaccaggtttgtgttttcttaaaataaaatgcagagacatgttttaagctgatagttgaggggttttgttaatggcttttgggggatttatctctatacccacaaacgactagtttgttttcctcaaactaaatgataatattaaaaatacacatcctggccaggtgtggtggctcatacctgtaatcccagcactttgggaggccgaggcaggtggatcacttgaggtcaggaattaagaccagcctggccaatatggtgaaagcctgtctgtactaaaaatacaaaaattagccaggtatgctggtggatgcttataatcccagctacttgggaggttgaggcaggagaattgcttgaacccgggaggtagaggttgcagtgagccaagatcatgccactgcactccagcttgggcaacagagtgagactccatctcaaattaaaaaaaatacacatctggcttctggaaaaattacttgaagatcttttatgacatccatccctcttcacacagccatgtgaattaggttggtatcttcatatactagcatcgtgcccagcacttccatgttatacagtttaaaatgttctgtaattccctgtgggaacctaagataatgcgaggaccgtcatacgtgcccccaaatattggcaaaccaatgaataaatgaatgaatgagtttatgaatcgctaactggctgtatttaatgaagtatgtgtgttgagccatttcccacagtgtggacagatttgtcccacaatatgggcctcttcccaaaggccctaccacctaatgccatcacactggggatttgatttcaacatgtgaatttggggagagtgcaaacactcagaccatagcaccatc

SEQ ID NO: 416 - DNA, 31737 bp, Homo sapiens
aagcttgatgagattggctcctacagtgaagagaagctgcagcacctgctaaggcagtgtggaatcccctttggggcagaagactccaaggtgagtgtcaagggcagtggtggatatcggggcttctggagtaggctgattggtccactttttaggtcagggatatgaatatctgtgatggcatctgccttggacacaaggtgctggcagtcagggatgcctaggagatggtcaacagctagatgtgacatgtatgtggggcctggcctctaacagttcctcctgttgaaggttgtgagcctaggctctggggtcaggaatcctggctctcctccttactgtgtgtgaccttggataagctgctttatattttgagcttcattttccttgtttgtaaaatggaaataaccaaaatactaaccttgtgagattgttgtaaggaatgcactttacacagtgtctggttactacctatgcaagctcttagaaaatgcctactgttacatagtgtatgtgtctatgtgttttattcatacattatttactttccctttcatatttctgtgctgttgaaaatgttatgcttccttcaagatcagattcaaatgttagctcccctttgatggtttctttgccctgtaaaaagtgaaaggactcaggcctcagagtctggcagcttgatcagcagtctggctggctttgtctgtgacctaatcctttcagggcctccgattgcttacctgtacctagaggaggttgggctgatgaggctccaaggcccgctctgacccaggcagtttattcttttgctttgggtgttgggtgagtgtgtgatgctgagcaccagccgtggtcccttagcattcgcccttatgtttttaatcttgtccttctactccaggaccagctctgcttctccttgttggccctctacgaatctgtacagaatggagctagagctatacggcccccacgtcacttcacaggtggtaaaatctacaaggtgtgcccccatcaggtaagaaaataactagggggagcttggagtgaatttgctaatgttgaacttcccatacagggactgatccagctcagttttggggggctagacttaggtcactgggcaacctccggcatagctgcccacgggtcaggtgctaccccctgggctagggagggaggctgggtcttctgtcagtattttttaagcaccctaccacatcctgggcatcagctgttgagggtataagggcgagcttgtataaagaatgacaaagatgtcgttcctccctagttgaccgtatattttagtggggaaataaagtcaccacagcttgtggcattggctctgaagaaattagataagggcctaagatagaaagtaacagggaggaacctgctgtctgaggtggcagagaagactgagacctgcaggatagggaggagcccattggtaagccagggaaggagtgtcacagccaagggaccaccaaggccgtgagtggggagacagagtgagctgagaggagggggtgttggagggctcccccggggggccagatcacatagagctctctaggccagagtaacagttcgtattttattctgactgatgagggaccttttggatggttttgaatgggaaatctgtggaagggtatggacaaggtggcactgggttagctccaggacaggttatgtactagatgacagagtgggcccaggtagatcttggaacggaaacccccccccttaacaggtactgaatgggagagaggtggcttatcagagccttcactgaagcacatgagtcagcagggggatctagctgtaaaaagagaatccagttcccaactactttaacagaagctgtgtctgaaggagatgcttaatgcttctactctgggcagatcagagcctgctcagggaattgtgttcatgcgacaggggatcatctcatgagaagcagctgacagcacggggagagctgtagatcttgggggctgtgatgggagtggcatcacttggaggtgacagccaagtgggtgtacccagagttgtggaatggtgcttggggggccctgtcagtggaggtgtttactaggctacattgtggattcccatctgggcaacaagcccactggggtctggtggggagcttgctcaaaatacagatgcttagaccctacttcagagaccttagtttcttaggtttgacctcgggcccaggcatctccattcttaaccagctcttagctgctgctgctgctatgtagctagcatagtgaactggtaggtgatgtggagagagtggggttttgaaagatgttctgaggtgcctttcagcctaagttgaggacaggatgctcccagctgtctctcagaagggcaaggatgagctggtgacttcatttaaggacagaagtaggaagggagcagcatgccatgggctctggcaggatggccatggcttcggccctgaagctgattgctcatcttcctgggaagaagcgagtgagaactgtacactctctgcagactggcttcctaattaaccctgcgccccccacccttcatctcccaggtggtctgcggctccaagtatcttgtgcgaggtgagagtgcccgtgaccatgtggacctgcttgcctcttcccgccactggccgcctgtctatgtggtagatatggccacgtcagtggccctgtgtgctgacctctgctacccagagctgactaaccagatgtgggggaggaaccagggctgtttctctagccccacagagccacctgtggtgagtcacctcctgaggaactgccatgtctcctcaagcctaccatgtcttgctctgtcacccaggctggagtgcagtggtgttatctcggctcactgcaacctctgcctcccaggttcaagcagttctcgtgcctcagcctcccgagtagctgggattacaggcacacaccaccacacctggctaatttttgtgttttagtagagatggggtttggccattttgcccaggccgttctcaaactcctgggctcaagcaatccacatgcctcagcctgtcaaagtgctgggattacaggcatgagccaccacgcccagcctactccgtaagtttttactgaccaagccctctgtttgaggccacagtatatcacttagtgtgcccaggatatcccaaaccttgtgttaaaagaggttgccttccagagaagcctagaaagttgccacctttgagagttattgtgcacactgacatattaaaggccccagccagccctggattagtttaattcaccatgtcttacatttagttgaccatggataacactgtatggcatgcctgttgtgatctgaagatacactggtttagaaaacactcatcttatccaaccctctccttttattaaaaggggaagctaaggcccagaggaggaaatggacttttccgggtcccacagcagattagtggcagagcccttgtctctgtgtcttggtatattgtaccagacagtatttctcaccagtcatgtaccctccaaggccagcaggccagcctttggcctttgctgaaatagatgtcagaactgataattaggaagaagggaagaataacaaaggttgagtgccccagccaggatgcattataggaagtgaaggcctctggctttgccttggaggagtcattattgtcattactccctggggctcactggctccatgagcatgctggggactccagaaaagtgtcttaacctcagtcagagcctgatctttctgctcccctgcagccactggcctgaatggaccgggggcaataatagcataagtaatccaacatctgttctggaaggtggccactgttactgtccctgttctcacatgaggaaatggaggcactggcgggcaggggttggcctaggagacacagtacatggtgatgttaggattcaaagagggctggctgagcctagagtgttctcgtcaccagatgggttccaccttagtcattccttcttatcaaaatgcattctcatttctcttctagagtgtgtcctgcccagagctcttggaccagcattatactgtggacatgacagaaactgagcactctatccagcacccagtcaccaagactgccacgcggcgcatcgtccatgcaggcctacagcccaatcctggtgaccccagtgctgggcaccactccttggccctgtgccctgaattggcaccttacgcaaccatcctggcctccatcgtggacagcaaaccaaacggtgtccgccagcggcccattgccttcgacaatgccactcactattacctctacaaccgcctcatggacttcctcaccagccgcgaaattgtcaatcgtcagatccatgacattgtacagagctgccagcctggtgaggtggtcattcgtgacaccctctaccgccttggggttgctcagatcaagacagagacagaggaggagggtgaggaagaggaggtggccgcagtggcagaataagccaggctgttgtacagggactacaccatctctcaagccatagtaaggcccttgcctgaggcagagctatccaggggacctgcagaagtggtctcctgtggggagggcctctgactgctgggactgaccaaagagcttccattccctgagcatggtgggacccagggtcctcagttctcaaccctccaggggtcaggagtggtaccaggaaacctcttctggccccgagagagcacttgggggacacggtatgtttaatggaggggaggctgagggaaaggctcgtagctggtgggttccgtggggcctgcggtgtgggtcagggtggaggtcctgggtgggctaaggcgtgagccccagcactaggtgggaaggctgctgaggtctctcccacccctgaggagccctggtttcagccccctcagtctgatgaattgcttagcctgttgcctttgactaggggcctgggtggcctcattaactctaggggtccctttgggctcttgattctccctgaaggagggatgcatttctctcttgctcttcctgtacccacatttgggggaagctgaggagggaggaacagtcagccacagctctcttccagcactgtcctctccaccccaagctttgaggaagagcatccccttcctcctttccctggccactgctgctgcagccaatatcctctctgggcctgggaccctctccacagaggggatgtggtccctggtcatgacataacctagcagcagtaggaaaaactcccttctatgaaggggaagcagactgggccataaggaaacagcaggactggctcaagtgcccaaggtttgtttagggcctgggaattggccatgtgttaatttattgagtggagtaggtggctttttttccctccctcttcccccaacaagaataaagtttattaaattatctggttttggtgtagcaggagtcaattccgtgcacatcgtatggggcacagtgtggtcaagctccacagctgtgagctcgtcacttcatgtgaaggagggaaggaaagaaagacgttccagggaatttgcaggtactcatgtggcacaaagaaccagaggctgactgcattaatgctgttagtttaatgtggacagagacatcccacggcgtgactgttagttaggatgagtcagcttgggggagtttgtgcttcctgcttggtgtggccagccacatgccaaggtcccctgccttctagcccagaatgacgggactgggcagaacacccccaacttttagctgccacttggctcattacagcagtaccagtatgggggtgggaggggtgaggctgtggagtgaaggcggcgtatagggcagagactaagaggtcctgtgagattcttagaggagccatcctgctccaaggggcctgagctgagtgtggtctgtgagcatctgctgctcctctcagagagggagatctcactctctgccagtctgtctagccccaaagagcctggttttctcagtatcagtgtagctcctggggacttcataggcataaagtcagtccatttccatgaagataaggggattaggaaagaaggttctactagttggcatagcaaacacgaggccaacaccatgagaacagtaggggaggggggggtgagggctcagcccccagcccctgactggcagtgatggcccatgctcaggaagtgggatcctctgacctcccctgaatccctcaccttcccaagtttcagagctgggccgagctgttgagtgaaatgaccgaaggcagagtttgtatgttctccccgtgtcgccccatccatggaggagttgaagtttgtgggaggggagagtggtactccctgtcgtcaactcctcagcagaactgatagttgttgggctgcagcaagggctgggcgatatccccttgctcgcagcaggtcaggtgctcactagagctctcctcctccagctcactgctgctgctgccgctgccaccgcttctgctgctgctcggcagattggtatagtcctgagggtgggagggaccagaaactgtcagtccagatccatcaggcccagcccaacgtgctttaccggccacccaccccaagcctcaccccactcacccgctctctcctgtcctcttgggcctgctcctgaaggaaggagcagatctgctggaaggtgggtctgtgggtgggctccaaggcccagcaggcctgcatgatgctgtatctgggagataggacagaggatgcccatgggcagctccctagggtccaggggccattaacacacacccctagagagacctacccagcagaggtccccaaacccagtcaaagtaagtttagtataaaacctatgccaagtccttggcatgctttaccatttaatcctcacagtaacccttgcagaagggtactctcatcaccctcattctgacagatgaggccattttggtatcctcagggtaactgtaataacgatctcttaaaagtctgtttagggacaggtgcagtggctcattcctgtaatcccaacactttgggaggttgatgcaggaggattgcataaggccaggagttccagaccagcctggacaacatagtgagatcccatctctactaaaaaattttttaaaaatagctgggcttggtggtgcacacctgtagtcccagctgtttgggaggctgaggccaaaggattgcttgagccctgaagattgaggctgcagtgagctatgattgcacacatcactgcgctccagcccgggctacagagcaagatgctgtctcaaaaaaaaaaaaaaaaaaaaaggaaaagtggtcggttaggaccagccctagtgaacagctgcttctctgagaacatcccccatagcttgaactcaaaaggggcttgttgtgtccactatgggagagataaagtctgaccctggaacattttggacagggaaagatcagggccacacggccttccatccctttccagcgaaagcctggggtgtccttttccctccctgggatcccttcgcttacatattctttggggcaaatgcaggctgggccatttggtatccatccttcaccagtttatagaacttgctgttcaccaggatgccagggtagggattcagccctgcaaaggccaagatcaggtaagaggccatgcccattgtcttctccccattcccgcacacccacacacatcttagactgggtttaaagggtcccacttgacaacactgcaacagcagctactcttacccggtgcttcctgtgtgccagccagtgtgtggcaggcttaggctttaggaaggtgtgagcctctatccaggccttatcacaccaaacattcttgcacaggctttggaatcagaccaaagcttcagctgtgtatcgttaaagtgtggacagtcaggtggttatgagggtataggagcagcgtatttaagaactgagtacaagtccttgtgcctagtcctcgggaaatagcagttctttctactagagcctagtagtagagagctgcatcttcaagggtctgtagatttcagacaaaggagggaaacagtgacaaaggagggtaacaggtaacagcaactgagcagagacaaacgagggaagagccagaaaggagcgcctgtcaggggcagagggtctgccgagtcccgcaggagccacgatgctgggtttcgagagcccttgcccattcctgcactctcaccaaccctcgctgtgtcctgggcaccaaacagctttgtccaccagtggggcaaccagaggagccagccccaggctctgcctggagtgggcccagtggctcaccaagtgagaagatctcccagaggaggatgccataggaccagacgtcgctctgaaccgtgtagacacagtcaaagatgctctctggggccatccacttcacaggcaggcgggcctgggatgacagtccccagttattttgggccccgactcttcaccccctccccagcctggcccaagccctcccagcacttacattgcccttgacaatgtagttggagtcattcatgatgtccctagccagcccgaagtccccaatcttggccacatgaccattggtcaacagcacgttacgcgctgccacgtcccggtggatgcactgagggaaagcactgcagggttagtcttgggccttctcctacctgagcctgaggtgaggaggatggcagggagggccccacatggctttggagtccctgctggagtgaacaacagttttggtcctttaccacaaacccttgtctataccttctaccagggcccaggatctgagaatgtgtatcgtgatctgatcatttaatgcttagaaacccccattaccctgagcagccatggcccttctcaccctttgtcctctgactggtctgctcaggccccagaagcgaagggcttccgtgcagagagcagtctccaaaccctaccgttacttctgatcatagcagctgctatctgccaggcccttccctaaactctgcacacattgaaccctttttcttttcaacaatcgttatgcccatttttataggtgtagaaactgaggcacagaatttaaatagttgcttaaagtcacggagcaggtggcagagccaacaatcaaaccactgactcccgaatctgttctaaggaagatggcaagagctcccattccctggcacttcttcctaggccgagcgcactttatacgttatctaatatccccaaaattctgaggaagcttccgttatcatccccaccagaccgcgtgctttatgagcagagacaactgttgtctctcatacactatttagtaaaaacgaatgaagaaagcctggtacccttcctcatcttcacgctggggacacaggtgcccagccccagagctccagccctgggcacagctttctcccactcatccttgcagctgctgcccaaatgactctctcatactctgtctcctcccctaccccctcacaggctcccgtttcctcctccccatcgtcactcatccagcctccccggagcacagacctgggtggctatgagccagggccaggttcctactcacattcttggaagcgaggaaggccatgccctgggctacttggctggagaagtgaagcaggtcccggagctccaggggccgtccatcctccttgtccaggtctagggtgggaagaggcgtcagggcagccctgccacactccccacccctcaccccagcagccccttctccttttcccttgttatcaagcaaatggggcctggccctgggacctcctcaccttgctcagagaaggagtcatttgaagaagtggagacaggcctcatctccacataggtgtccacaccctggctggagaagccactgtccctacataggagagagggttggggggcagaggtcactcatcatcactgcactgctcagctcaggccttgaccacccaccaccccatggtcaactggaacctccctttctgataagaaaccctcctgccacactccatctgagtgagcattggtctctgctcggctgtccccggtgagggagcttacaacccattctggttttgggcagctctgcctgtgagaaagttcttcactgttcctaatgccaatctacccctgagattttcctcctagcccctgctctaccctcaagggccacagagaagttggagtcctcttccccataacagccctactagaattggggcatattctagggccccttgtgccctctcttctctggacagtgcctcacacccctggcttcacattaaaatcacttcgggagcttttaggatcaggctaattactaatacttcagaaactctagggacaaaacagtcattcacagatttaaatctccccaggtgatcacaaagtacagcctaagctgaggcccactggtctagagcagtgctgcttacgctgcaactcatgtgcagataaatcaccccgggaatctctgcaatgcagattttgaatcagcaggcctgggtggatgggcctgaggtggtgcacttccaacagtcctcaagagatgcctatgagagcacacttggggtagagaatttgagaagcactactgtagactgaagcactactgctcctaacgttccagccagataggatttctctctccctcctgtcccctctgcgctagagatgtgtaccttgacaatgtccatattctagtgttcccagaaggagaaaccgaaaaaaccttccgctcccttgtagaaactatgcttccgttaacagcctggaatcctttgacagagttggtttacaggccatttgccctcgaaattacccactctgggaatactttccccatctgcgtatttgaagatggaagctaatactttcctttggtgctcattttgatctgatcttcagaggcctagtgtgtgccaccctcatagaagtgtcagggaatcagaagaggaagtgatgctgccaggcccccatttttaaggccctgggtgaagagatggcctccttctcttttgcctccccaggcgtggcagctgacagtatctaggatgagggcgcagtgtacacccttcttgttctgatcctgtcctgaccccacaagcccctgagacagagacctccaggacagcagtgtggcttgggtgactcctggactggaagtcaagagagcaggattctagtccaggctccacctctaaccctgactcatgtgtgacatgaatctccccacttcctctctttggttccccatgtggctctgtctgttggatggctctgttctggatggcttccaggaatcacagcaacaggacaacagagccatctctctttttttttgagacggagtttcattcttgttgcccaggctggagtgcaatggtgtgatctcagctcacagcaacctctgcctcctgggttcaagcaattctcccgcctcagcctcccgagtagctgggattataggcatgcgccaccacgcccggctaattttgtatatttaatagagacggggtttcaccttgttggtaaggctggtctcgaactcccatcctcaggtgatctgcccgcctcagcctcccaaagtgctgggattacaggcatgagccactgcacccggccacatctgcccatctcttactagggctccaggcacagatcttggttgatcttttacacacactgggtggtgatttcattgatgcatatctccaccagattatgagctgcccatctttgccctccacactcccagaacacggtaggtgttcaaatatttgttgaatgaaggggaaaaggagtagagaaacaagagatggccataaaacctgtggtggctacttcccatgacacaggtggcaggtgagggctgcatagccacccattcatgagccatccaaccctgagctggctttgaagacagactcggatcctgcctcccagacctggcctttttcttgtcctttgccaggggctacctgcggacatatttcttctcgaggtggatgttcttatagtcgacgcctccctcggggtcctggccggggctcaggctgggtcccagcatggcctcagccttccttcgcagaaagttgagcaggtcgccatagcaacagtactccgtgatgaccagtacagggcctagagcagccaagggtgtggggtgagggaggtgctgagtgctcccctccatgaacaggagcatgagactgggggcagtgaggccactggacttggactcagcatagctgagttctaacctcggctctgtgagcaagtttccttgtgcctcagtagttccatttgtttaaaacagatggctttggcggggcacggtggctcatgcctgtaatctcagcactttgggaggccaaggtgggtggatcacgaggtcaggagatcgagaccatcctggctaacatggtgaaaccccatctctacaaaaatacaaaaaaatcagccgggcatggtggcatgtgcctgtagttccaactactcaggaggttgaggcaggagaattgcttgaacctgggaggcagaggttgcagtgagccgagatcgcaccactgcactccagcctgggtgacagagtgaggctccgtctcaagaaaaaaaaaacaaaaaatgaaaaaaaaaagacaaccttaaaaaaaatgtagcccaagaattatttcttcaaaggaaagctatggcggctcactgtaggtcagagctgctatcagtgaagaggatgtggggcacttggagtcccagcaaagcccggggcacctttgggggccctggggagagtgtccaagcatccttgaatggaagcttcataagaggtaggcggggggcttcactccagacccagaggatccggctccctggaagcagggcctaggagcttgcacattcatctcctcctccaagggctccgatgctccctatcagtctctctttatacctcaagctgcccgtgcagctcctgactattccaggagatgggcccaggagtttaagggatgctgtgaccgggatccccctgacacttggagcagtaggatcctgagaaggagaagacggaacaaggtagccctggggccctgagattccccagaggccccaagaccttggccccaggaaccccaaggcccttacctccatgggtacaggctcccagaaggttgacgatgttctcgtgctggcccaggtggctcatgatcttcagctcggacatgagggcctccttctcatcagcatgggccgtggctgggaggaagaaccacagtcccaaagacagggagagggcaggacagagagcaccacacagatacatggggaccaaatgcagagacccaggggagaaagcagggcataccccaagacccggagtgaccagaagccaaaagaaggagaaggaaaaatgcagacacacagatggcagagagagagagaggagggatgagcctgtcactgagctggtcttcaggtgacaggaagccaaactgtggccaggccatggccataggtggcctttctgcacccccagactttttggagctcagtcaggagccccttcacaactaaagggtgacctagaccttcttggagccgggagtcagagggtgcctggagctcacaagaaaacccaagtcctcacccctgagctctgtcccccaggcttcaacaggttgaaatgtgtgtgatgcctcttgtgacaccagggccagcccacccccagcatctaccaccccccatcccttccctcatcccctcccctcactcacacttcagcatcttcacagccaccttcaggacagcatcctccttgcccagaccaaaggccgtggcctccaccaccttcccaaaggctccagctccgagggtcttacctgccacgcacacaggtcccttaagtccctgggcaccaaagggcctctgtccaagggcccatgggctccctgcaacccccacaggccctgtgataggaagctgtggagtgatgagctgccatctcaccaaactgcaggttgttccgggggaactcccacttctcgttgtaaggcagctgcgtggggtcgatgaaagtataactgttgccctcatagctctcgatgatcttccagcggacctggtacttgggcttctgcagaagaggaagggagcacgtggcagtcggggctggcaggcagttcctggaccttgtttctgacccccaagagcaggggtgtgggcagtcccaaggcgcccagtgggagaaggcagggcaaggcctgctctgggctgagagaggtcgtctcatgaacatagcactgagagcatgttcctgcttgactctgccttgttgtgtgaccttcccttctccaagcctgtttcactatttgtgtattgaagaccttggacaagacaacctctgagggccctgatatctctgataatctggtaattcctgagccaggagggagggtggaacttgagatcttatccatccgttcatctgtccatccatctacccatccatccacccacccaacctcccatccaaatatatatatatattttaattgtgataaaacatacatgaaatttaccatttcaaccatttttaagtgtatggttcagtagtattaagtaaattacattctaccttgtgcaaccagtttccagagctcttttcatcttgcaaaactgaaattctgttcctgttaaaaagcaactcccctttccctcctccagcccctggcaaccatgattctgctgtctctgtgaattgcactgctctaggcactgcacctcagtggactcacacagcatgtgtctattgagattgccttatttcacccagcataatgtcttcaaggttcattcatgctgcagcacaggtcagaattcccttcctttttaaggctgaataatagtagcccatccacatactttcttgaacatctatttgtgtcaggcaccgctgattcagagttgaacaggacaaagtccctgcccctccatggagtttgcattctagtggctgagagaggcattaaacgcaaataaacatgtatctaggagattctcaagtggtgctatgaagaaaataaagtaagataagtcagggaaggcccctaaagagcccaccatgtgaccatcagaggaagaattttccaggaacagtgcatggaaatgctgtatgcttgacatgggaatgatcctggcaagtttgagctataggaaggcagccatcatggcttgagggaagtggggggcagattccagaaacaggaaggccttgagggctatgataaggtgagtgggttcccttttgggatttttttttttccaagacaggatctctgtcccccagactggcatgcagtgggggcagtcttggctcactacagcctcgacccccgaggttcaagcaatcctcccacctcagtctcccaagcagccgggactacaagcatgtggcaccacacctggctaatttttgtagagacggggctttgtcgcagcctaggctggtcttgaactcgtgagctcaagcagtttgcctgcctcggtctctcaaagtgctgggattacaggcatgagctaccatgcctggccgggcagtgagagaccctgagagtttgacacaggtgagtcgccatctgactttttttttttgagacagagtcttgctccttcactcatgccggagtgcagtggcacgatcatagctcactaggctcaaactcctgggctcaagcaatccttctgccttggcctctcaaagtgctgggattataggcgtgagccatcgcacccagccttgactttacctttttgagagagaaagagagacgctgcccactagatagattctggaggaccagcacctttggaaagacctgatttccttccttaggctctccatgctgttaccacccagccaggggaggcaagccctgggatgtggggaggaggaatggctgcccctgtttcttgcccaggggtcagctgctgagggggagtaccatgctaagggttgcccacaagaaatgctgatggaagaccaagttgagggggaaagtggaagctgggctggggcggtggaggacactgaggccctgggtcagcagagcaactctttccggccaggccttggggatgggacaagcttggctgtgcctgcagctgggctccttccctgggcacccgagctagaaacttaaaggaagtgtggaccggtgctagggaggaggctggcctttagctgcaagtcctggttgagagagaagattccagtcatgtcctttgcagcaacgtggtgcagctgaaggccattatcctaagcaaattaacaccgaaacagaaaacctacataccgcatgttctcacttataagtgggagctaaatattgagtgtgcatgggcataaagatggcaccaacagacactgggggctactagagcagggagggtggaagcgggcgagggttgaaaaactatgggagctatgctcagtagcaggtgatgggatccatattccaaagctcagcatcacgaaacatacgcatgcaacaaacctgtacgtctatcccctgaatcaaaaataaaatgtggacatttttaaagagagagacagggagaaagcttccagctaaccatcaggaagaacttctagctggtagttagagagaaaagactgcaattagaaatgagaaggaactaacttccaggctctgattcggaagggcggactgcaggtgaacttcagagcctctgcgttatagcttgggagagagtctgaaacgggacccagggagaagaacttcccaagcctctgaggatccaaatcctgcccgtgggtgccttcccagcccaaaagacagcaacaaggcaaggaggggattcttcagcctctcctggccacttccatctctaggagcctctgtggctaagactgttttttcttaccacttcttgttcctctgtccctctgcagctgggctgagtcagcccctccctgcccccagctgggcagggggcactgttgaaagggaggggatcaaggaggatggaggtttggctggattctcagatttctgaatcctaggctcctaatttctggaagcggaccaagctgccttctgcctgcctcaggaaccctcccctgcccctgctgggcatgtaaacctcccagggcacctgtgccatccctggaaagggctcatgggcgtctacccagaggcagcctctcttccaaagaactatgagtgagagatcaagaggtggggatgggcgaggctccctgagaagggtggacgtaattgtcatgatggcagcgggttcttcctgagctcttcctgggagtggggcgctgggctagatgcttgaagcacatcaccccattcattccttgcaatgggcctaagccccaggcccaccccctgacttcttcccttcctcccatcctccccaccaaagggggcatggagacaaagtcccggtcccctccccatctaggcctgctggttctgggtgagtggatgttctccatcccaggaaggtggagatctgaacaattcccagtggaatctttggggaccctcctgttgctcctcagagctcagttccagcccccagaatcgtagtctttccagcagcctccctggaccctcccttccctgctgcctcagccatttccctgtgcgcctcctcctccaggggagcctgctgactcctgcccttttctcttcccccacggccccccttgtggtcactctgggggacagaaaggtgatgattcagccctgaggcagaacaaacactccccacagacaggccacttctttccccaggcctgggcaatgaggagaggctgggctgagtccccagtgaaggggcaaggctccgaacctcatggggcaaggcagaggaggatgggagggcaggcacttagcacgggcatgaccatcctgccccctccgctcccatgggtggacacctcggcctggagctaaagggtctgtgaatgggtgtaggggaggagggtagctgcaagtcttctcgcagccttgcatgggctccaggggcagctgaatttcctggacaggaagtgtggaggtgacatgttccaaaaatggtcccgtggagaggggatacagagttcctaaaccacagccaagggggctggccagcccaaggcagaaagggccgcagggggccctaggctcttctctggaatctctgcatgactgtcctggcagctctgtgggcactgcgaggcagttttcagttccatgtaaggaagaactttgcaaacattggagctgctcagagaaggaacaggtggccccgagagtgagtaaggtcctgtccctggaggtgggtgggctgggccaaacaaccgctttgggtgtgtagtcaaggagatgatgcccgacctcagacctccccctccttccaccatcccaagaggcatgagctaactctggttccccaacgaacttcctcctgggacaagagtgtgcagctcccatcacagagactgtctcgtccagcaccccgctcagtcctctatgtgcgttgtggtacggaatccctcacaacaggctgttaatgatcccattttacaaatggagaagagactcagacacaccaactttctcatcatcccatagccagagcttggcagaggcaggatttggacccagattcactgaagtccaagtttctggtgcttaaactagaccaccagtgggctcttggcatgtcagaggaggaggggctgttagagaacacccagacccatggtataagaggggaaactaaggcccagagaggacagcgagtcagctgaggttacatggcaaaacagtgtcagagctggacctagatccggaggtattgaccggggctgccctcagagcagccttctcatgctgagtgctggcaggagtagagatcccgatccatgtgcccctggggctcccccaacatccttcccaccctgcccacttcaagccctcttctcacaaaagccccaagggggtgtggggaagaaaaggtagccaaggggacacaagatgggtcattcagtccttgatcacaccactcccttgttcaaacccactgatggccttggaccgacagggtggggtccaacccttcagacccccaaccccaccctggtccttccctcacctgcacctctgcacactctgccctctcccccagaggtaccctttcccttagtgtcatctcccctgctgcatcctcatcctccaaagcccgtcccaccaatgccaagccacctcctccaggcagtctcccttacccaccagcctgaaaagtccgtccacctctgaactcccacagccctctggcctggtcctctcagcttctgatcacattgcacatggtctttgtgtgggcaggcaggcagtggaggccatgggctctagggacagaagcccctggggcccagtgccaaccctatccctcagccccttggggtttttttttttaaccttgctgagcctcagcttcctgatgggtaagatactgactagtatacttcctgcctccagcttcttgtgagggtaaaataagatgagtcaatgtttcacataatgattgggacatgctttggagtgagtcctccttcagggttaaaaaccagactctgcctttgaccagctgtagacaagggcaactgtcccaacctctcagaacctcagtttacaactctgtaaaacagactaatgctagctgcatacagtggttgctgagggcattaaatgagatgatgtaggtaacatgctatagaaaaatgcccctcaaatcactgtcatatactgagcagacagtgacaggaagcacactatacgcaacatgcactaaattgtggctttggctaataggacagtaacatgaaataatgaagaggatgatggtcacaggccctcgtcttcactagaccatgtgcttcttagggcagggctcaggcctggcccaggggacaccacgcttgtatatccatttcctctgccccgtgctgggtgccaggacacccctgggctgagacaggatcccagggctgcgctgcctcagaatgccattcctctcctcatagcctctcactctataatccatgctcttgctttcacggctttttgtttgttttttgagctgggatctggctgtatcacccaggctggtccctaactcctggcctcaagcaatccccctgcctcaacctcccaagtagctgggattacaggtgtgcccttgctttaatggctatttgattagcacctgtctctcgcactagacagtaaacgctattagggcagagcctcagaggccacccagcagctgactcatgttggcatacagtaggcacccactaaagagctgttagctgatggactgactgaggaggaggaagggtgaatccatgcagcctgggggtaccatccaaatctggctcactcaggcacctggcagccccactccgctccggctcacctgcttatacttgtacaatagcagcaggagcagcagcagcagcaaggccatgatggacatgcaggcgaccaccactggtgtgaagaggaactcatccgggggatgcgtgtgggctcctggaaggcatgaagcaaagcagtgagcaggcaggggtgcctccgagccccctgaggtcaggcctgcacactgcctggaacacagtgggtgctcaataaatgcttgttgactgaatgaagcatcctccactggaagcctctggagcctctcctgcacaccctccccgagaaaggcagagaggacggcctcttcagctctgctcatgcccagccccaaaccctgtccagagtcacagcctcctgtggctgggggtagggagcctctggggtcatgcagtctcaccctctgccagtgcaagaaacctctctgcagcggcctggcctggtgcccagccatggcttgcatgcactacacctccaggaagctcgttcagaaaggccttctggaggtcacactgcaaccttcctctcctgcatttcccctgcagcttctccacatgcctttggaatcatacagcccttctgagggtctagcaagccaggcttgtggcccctgagtctcctcttcccagaatctatactactagttctagtgatgttttggagaacataatttccacttccttgctcagatcagtaacttagatctgcagtcaagtttcacctgtgccacttgggagctgtgtgacattgagcctagggaaaattctatttatttcctaggtttgtaggagttaatcgagataatccccacaaagagcttaacacagtgcctggcgcagcagaagccttcaacaaaatgttggctttattataatatacaacctccagcagtgaggcccagcgcggccgcaggctcctgcttgcagctggaccctggtagcagttgctccaaggccagcagctggggacgtgagtgaccacccctgagccaggcagatgccagggtctggcacacagtgggtgccagagcctggttgtcaaaagcctgaggatgctgtgggcctctgagaatcacagaactagctggtaaggagcctttgtgtaaagcagagaggcagcctgtgttgtgcacagggccgggcatcatcccccggggcagcctcttgcacagcaacctcaaatggatagactgtgtctggagcaagaggggagagttggagaaggccgtccttagctggccccgagctggagatggactgtttccttgctcattgcctgcctccctcatcagcctctgagctctggggaggcactgcttccctgcatagggcacgtccctggcacacggtgcataatgcctgcacatacttgtgaatagatgcatgagttagagtgcagggacaagagtgggggccagtttcttcaggctgctttctctctgctttctcagagactaccccgtcctactgcttcgggggacctgccaggcaggaggggcttggactggcccagagaggtggaccttggtactgctaggatctgctccaaaggtggagccaaccccagctccctcggtggggggtgggggaggagccgcctaaaggagcaggggcggggggcgggcgggggggcggtgcgggtgcgaaggctccctctcacctgcagagatgggtatgaaggcccaggagccactccccacgctgttgtgggccctgcactcgtaggtttggttgtgctctaaggtctcaacagtcagcaggctctgcaccgtcaccttgtggaagggctcctggctcaggacctcagggtatgggtcatcccagacctgcagcacttgggcctcatcacacctggcaaaagcagaatgtggctcagagcttcagggttcccagcgccagcatgtccctcccactcacagggtgcccagcccctgagcccaggtgagggaggtgagtggagcccacttacctatcagtgtggccactgcactgcagccatgtcacgttgggctgggggtacccagaggcagcacacaaaagggtgccagagccgttgatgaatgtccatatgacgcttacctctggggggtctgaggaagaaaggaggaggccccaagtcacactttccccgccacctcccaatctcccagtacctacttccctgtgccctgccccagtcaaccccatccctccaggcagtcccagggcctccgccccaggtggcgctcggccccagcactcacatcgaagggtgagctcaaacgtcagagctctccagcctcctgggtttctggccaggaaggagtagcggccagcctcagagggcttcaggcggggcagagagagggtgaaggtgtgcctgcaggagagaatcaggtggtgttggtgagccccagcctagtatggcccctgccaggattgcagtcagataacagccttaaaggggtttattttatttttggtaaaatattcagggcccaacggccttgggtaagccagatactcagacagggtgccattgagacatgcaaaaaccaccaatcccatttccttagttggttttcttatctgaaagtgtttttttcccgaggtttaatagaggtgatgtcttcaaggtgctgggaggcctatcacaggtcgcctacgttgaccactgtcactggactaagctttcatgaaagctgcaatccctgctacaaatccctgaagtgccaaccttgccaagagggactgagaaagagacaagaggcaggatgtagggccctgggttctgagccatgttgctgcagagactggggttcaagtcctggtgctgctgtttcttggctgtgtgatcttagacaagtacttaacctctctgatccctcacttcctttgctgtgagagtgatatcgatggttattaattcacaggcttggcttgaggattaaaggacctttttagggtgcttgacacagaagttgaatctttgtgggcactcaattcaatggtaccctttattacagaaaaggccctggagcaaaaactaacaataaaaatcatctttggctgattctgggaaattttttgttttattctttctttaatctctattttacaatttgtccataatgaacatgtgttgtttaggtaataaatacattttttaaaaagtcccccagttcactgtcaaaataaataaaattttaaaaattatagcaaatggccagttcttgcttgggaaatgtctgcagctactactagactaaaatctatggtattcagagagcagtctcatccagccagaccctgggcatatacaaggcctctgcccaggtcacttcttgagataactaacccctttaactaaaaataatttgacttttttggataattgaaagtcaccattatgaacaacccatcacatgaactaaaattctgtggctgtttggtgtccaggcttgtctgccttgtgctgaatgggcccagactactgtgttttaggggatctcgtgttcctttcctcaatgtctctgtggcttatggacccattaaaccgatccatggaccagccccctccaaagggcctacacattccagattcagaacttctgctttaaatgagaggaagacagagacctggccagaaaggaccagaagggaactgagaggaggaagatgaggacaagaaaacatccttgttgcttctgacaattgacaagcaagattgtgggaatcaatgaggtttgggcttccagagctagaacgagaatcccaaagagttttgaagttgtctaagggatccacacagggatgacaaacagatctctcatgagccaactatgctggaaatactgcctgggacctgtgttgaggaggactctgaggccgcatctacactctgcagaacagagttgcagaaacaagaatgagagtgagtgtggcatgcacaccacgtattcgctgcccttaagctgtactgtctccctctgaaagggcagggtatgaatgattatttcaggccaggcacgatggctcacacctgtaatcctagcaccttgggaggccgaggcaggcagatcacctgaggtcaggagttcgagaccagcctggccaacatggtgaaactctgtctctactaaaaatacaaaaattagctgggtgtggtggtgggcatctgtaatcccagctactcgggaggctgaggcaggagaatcacttgaacccgggaggccgagtttgcagtgagccgagattgtgccattgcactccagcaacaagagcaaaactccatctaaaaaaaataataaaaagaaagaaaagaaggaactattttaatacctgagttaatacctgatatacctggtatgagtgttcctcttaggcacaaagctttcttatttagaacctacctgcttaagccactttggatgagaaagcaagaccccaagaacacagttcacaagcagacaggaaaaagatttctaaaatgtgtgtggaatacacaggattgtgggagtggagagacggaagaagaggggtgtggagttattatagattgcacttcatgggaagagttttgagcttacagagaagagcagccagtgagaaattcttggggctgggtgatcacaatcctttaaagaacatttcatgtatctgtgattgtgtgatcttaattccctcttcccctccctccaagcttttgtatgtagcagataacttgtgcagtcattatcaggagtgtgtctatgagtggggctgttttctgcatttggattggccccaagagaggaaaatgaatgaggctgagggttcttgagggaccaatgagaatgcacactcccaagaaatggtagaatccttgggtggggcattgactatcccaaggatgtgggatggagaggtaggtcaatttcatctagatctcaaacacagatgaccaatattgggattccatgaagtcagggaaagcgaagcccagaaaggggcagggacttgctcaaggtcatacaccaaggttgggacatgagccaagcgtcctgatgcttgctgaagcataccccatctggttgtcgggctgtgtagacgggagctgataagtggtacctgtatgtgtccttggtggtagcattagcaagcttgggctcaggctggtggtcagaaaagggtcccaggtaggtccagttaaaaccttgcaggcctgggtaggcctccaccatgactttgaggttgagcccctcccccacggtcacctcctggatgaggttctgctcagagctcaagttcaagtaggcactctctggaaagcagaacacacaagcatctggcattagtgggaagatgtccttgtttatttgtccattttgtcatccacccattgatccagtccctgagcagctatgtcacaggtacatagtccccaccacccaagacaggtcctctgacacccctcttctcaccacccccttcagaatccctggatcaaaacttttctcactgaagccctaggagaacctgggcaaatccctatccccatttgtgcctccatctccttatttgtgtaatgaagagattgaatatatctgtgattttccaagtttttgaaaaatttttggcagcaagaaaacacacacacacatacacacacaatttcacgtgtcctcatccatttccctttcttctggtcataaattagtcaatgcggcttccaaatatagctctggagtaggtgtgtaacccaggccaaccagtgagggtactctgtcccctctggcccggtgattggtttgggttaccatgaatccatgagtccataacactcaattccatgatttttgttaagactctgggaaaagagaagccctcattttactggtgttgctggatcagatactacaaggcggatagtcggagtcctacaaggggaaagccttcctggcagggctgagagttggggagtcatagattctttccagcatcagctgaacacctggatccaagtgttcctgaagctgatatccatgagctttttagctataaggaaaaaaatccttttaattaggccagtttgagttggtttctattacttgtatctgaaagagtcctgactagttttttttttttttttttttgaaacagagtcttgctctgtcatccaggctggagtgcagtggcacagtctctgctcactgcaacctccgcctcccaggttcaagcgattctccggcctcagcctcccgagtagctgggacaacagttgcatgccaccacgcccagctactaactagtttctcctaatgacattttgcacagattgtaatacagctgctcttgttgaatctcaggcaagggaattgtggcaagaaccccaattcactcagcctctccgtgcctgtcatggtagcccctgacatgccttcttaaaacctcagggctctgccacaagccctggactagatgatttctaagagctcctctccttactctattctgtctaaaaatctgaaattcacccttctacactgatatatgtctactcaaaagccctctatggagtcccattgcctccattattcagcgtggcgttcaaggctctcaatcaaatcaggtctcactgtgctcatccagccacctcccctcttccttcctacacacacacactcaacgctccacccatctgggtctcctaacatccctgaacacaccatagtcattccaaccttggaggttttgctcaagcaatttcctctaccagaaatcccatcctcctccttttcattatagaggcccctttatcctttaagattcacccccatgagggagtctctactcagtgctccaggacacaggaacctctcactccactcgacttttgctgcccttccagactacacactcattaggcaccacatctgcactgcttcatgcatctggttctccctccaggtagctttcttctctctccaagtagtctgtgagcttttgggggcaaggcttttctcttctctgtctctctcaacaatccatctatctattattcatccatccattagtccattcatccatccaaacaccaacaacttcctgctgccttcaccattaccactctagtccacccaccatcagctccagcctggaccactgcggtagcctcctttcatctcaccttcccactttagctctctgacctcatctgagaccactttttttctcactctctccccgcagccacactggcccacttgtcccctgaacatggcaagcacagtcccgctgcaggatggagctcccttctccaaaatggccgcatggcttgctccttcagcaatttaagcctttgctcaaatatcagctttctagtgagatcttccttggtgaacaccctatctgaagctgcaaatgctatataatttgtttttttaataatttacttggctcattgcttgcccactcccagctagagcacacacttcatgagtcgggggttgttgtatctgtttcacttgcagctgtatcctcgatgtctagaacagtgtctggcccaaagtgtgaatgaacataaacatttcttgagtgatgactgtatgcctgtactagaaagcagacaggattagaagccgtaactgaattcttgtgcttttgctcttcttcccctttaccctgccaaagctcccagtgcagattggggtccacagcagagctcacaatctgctgcaagtccagtgccttgcacatactctaggggcagtgatgctcatgattctcatgctcctcgccacctccatctcccataacattcaacacatgaggcacggccagacctaaatgtctcagagcctgctcccactccgatgagctgctgccttgcttcagggtctgagtccagtgactgccactgcctgcacccaatcaccatagccagagacctggaggtcatccttatctcctttctcttcctcatccctgcatctcagactcttccacacaccactggccatcttcagcccattctccagcctccaggttcccacccaacccacatggtgccagactgagccttctcagatactatctcctggtgcacacttggacagcatttcctgtgtcagaccctgttctaagtacttcctatctatctatctatctatctatctatctatctatctatctatctatctatctaatctatctatcttctatctatgaaggcagttactgttaatatcttcattttacaggtaggaaaactgagacacagggtggttagcaacctgctagtccttggcagactcaggttggaacactgccctggagtgtgtgctcctgaccaccacgaagtgcctcctctgtacaatctgaccccatcactctcctctttacaatgacctcccaataggttaagatgcagttattctttctcactttaagacacctttacctccggcttctgccacctcctctgctcccctgtggccactcctcacaccactccacatcccagctgttgtcaagttctttcagtgttccaaatgatctatgttctctttgcctttgagccttgcatatgttcctccctctgccagaagcgctgttccccttcctttcccacccttctgcccggccaactcaccttcattcttcccatcccagtttagaggccaccttctcgaagcctgggttggggggactcttcagtgttcccaggacaccttgtgcttcccccataatcactgggtgatcattgtcttttcatgtttccataaaggaatgcatgaaagaatgaacaaatgaagtccagtagggagctactggaccccaatccccaaataaacaaaaaatggcactaaggtgcacccaatgcagccatgcactgtaagagctccaagatgggagagagatcccaggagagggtaagggaaagctcctggagagtggctccttagccaggccttggataaacaaactccagcagagatatcctcagcaggtctccttccctgacatcagcttcctcctcaaaacccttctgctcacactcctgcaggatccctaccgactgtccaccaccaccctgatgcttacctaccacccggaagaacatggaggtggagtgcttgccctgcacgttgctggccacgcaggagtagttgccggcatgttggaaatctacttgatcgaggttgagggtcaggactttttggtaacggttattatgaaagtcagattgttgagggattgcgagctgcagccagaaggaatggagatgttataccaaggtagtttagggattagaaagatctgggttccaatcctcagcctttaaggattactatctgcctttcctctgagcctgttgcttcacttgtaaaatggggctaatactggctccctgccccaagactgtagtgaggagtaaatgagatatgcatgcaagtggcttagggctgtgtctggaacacggcaggtgcagtgggaagggagggggctcttagaggcagcccaacgtgagtccctcctggaatcctccctcctcctccctctctcccaatgtctttctgaaatagctgttatattcctgggcttcaatggtggcctaggaaacccttgctaaatcagaagtgagctcacctctggcttttgtctaaaggctggggcaaaggccatgtgtcaaggtgacagagaaccacctccccccacccacccccacaaagttcagcggcacaagcatgagtcctgattctgtgtcagctactgactgggagtgagatctcgggtgagtctgcacccctctctggagtctgagctgtgccttcagctaagacagccagtttggagttgggggcccaggactccaccatgggaaacctggtgtgctgggaggatggccagacttcaccttgtgatctgcagggactgaccttggtgttgttgtgttggaggaagacatcaaagttaacatcaacgctgctggctgagcacacgatctgggcagcctcccctcgaatccgcaccagctctgcaggcaccagtgtcaaggctgggggccctgggatgactgagaccgggggagagacccctgaacacccaggctccctgaacatgatagagatattgctctcctccctgccatgggccaggacacacaggccagggtccccatcactgccccatcccaaatcctgggaggcagccttgatgctcccagtccccccactgcaaggcctgtcctaaagagaccttggaaagtctactttctccatcacctctacccctccccagtcccgtcaccattctccactctggacttctgcaccagcctcctcagagacctccctgcctccctccaagccccccacacctagattcttcactaaagtgacctcttacaaatataaatgggaccatgcctctctcctctgtaaacatttggggcttcccattactctcagaaaagaagtcaaagtccttccacagcccaacctgtttctgaccgccctgataaccccaccccttgttcactgcactgcagcccgctggacctctttcctaccacagggcctttgcacccacctttccctcctggaatgcctttcctcccacacttcaaatgggaggctgttctcatccttcagatctttagctcaaaaattcctcagcaaggcttctgtgaccagctgatatgaattagcctccccagcacctccatgcccgccactccccagcttggtttcttgctcatcacatttgtatttactttctatttaatagttagactctagtcgaatgtcaaatccgtgacaggaatattccagcagccagcaagatgcctgatgcacagtaggccttgaattcatatttatgcccattgctgctgttgaaagataatctaatccagattcctaaggcccagggacatgaaaggactcacccaaggtccctgagggggtgtcaaggcagaactagggcccaggacctttggctcttggccagcccagggctctgcaggatgaaatgccaggaaagagccctaatggcctcctctgcccacacagctggggtcctttgaccccctgggcaggtttagtggcttcagatcccagtggcattgggctagctgcttcactctgaccctggcccttgttacagggactgattgctgtctcaagcccaggtcctcaggctggggtcctgcttgctctcaccagtcctcc

SEQ ID NO: 417 - DNA, 1237 bp, Homo sapiens
tggaaaagtcataggaattgatcacattaaagagctagtagatgactcagtaaataatgtcaggaaggacgatccaacacttctgtcttcagggagagtacagcttgttgtgggggatggaagaatgggatatgctgaagaagccccttatgatgccattcatgtgggagctgcagcccctgttgtaccccaggcgctaatagatcagttaaagcccggaggaagattgatattgcctgttggtcctgcaggcggaaaccaaatgttggagcagtatgacaagctacaagatggcagcatcaaaatgaagcctctgatgggggtgatatacgtgcctttaacagataaagaaaagcagtggtccaggtggaagtgattttatcttctgctctttcttcttccacacatgcaagggatgaattgtaaaagcaacatcagcttgaccagtataaaattacagtggattgctcatctcagtcctcaaagctttttgaaaaccaacaccatcacagcttgttttggactttgttacactgttattttcagcatgaaaatgtgtgtttttttagggtttctgattcttcaaagaggcacagagccaaattggtagaggaaggatgcaaagtataaatttgtgtaatattactttaacatgcccatattttacttggaaatattaaaagaaagggttctgtaaaatggaaaacttagtttgtgaattgattttgaggagtggtttttcttttcttggacacttaattctgttctgatattaatttatcagattgcttttgtgcattggataacaccaccattcacaagttaagattcttggtatttggatatctgttagatgctactaagaaaatagagatgagctttctttttaaagcttttgatgtggtgtcatagaatagcatgttgtagatacaatcagctgctttgttaccttaaaactaggcatttgtaaatattaaaccataagatggcaggtgatgtcctgtaaacactcagctgttcagattggacataactgacttagttcttcccttctctctctctcaaaattataggagacttgtagtttagtgtggttttctgtttctaatttgctgctgataatgtatatgaacttaacatgctgtgtaagctgtgtcctagttcttgaacagtttatgcagtgctgctttgccaaataaagttaaaagtaaaagaggaaaaaaaaaaaaaaaaaaaa

SEQ ID NO: 418 - DNA, 2292 bp, Homo sapiens
cccagcctctgccaggttcggtccgccatcctcgtcccgtcctccgccggcccctgccccgcgcccagggatcctccagctcctttcgcccgcgccctccgttcgctccggacaccatggacaagttttggtggcacgcagcctggggactctgcctcgtgccgctgagcctggcgcagatcgatttgaatataacctgccgctttgcaggtgtattccacgtggagaaaaatggtcgctacagcatctctcggacggaggccgctgacctctgcaaggctttcaatagcaccttgcccacaatggcccagatggagaaagctctgagcatcggatttgagacctgcaggtatgggttcatagaagggcatgtggtgattccccggatccaccccaactccatctgtgcagcaaacaacacaggggtgtacatcctcacatccaacacctcccagtatgacacatattgcttcaatgcttcagctccacctgaagaagattgtacatcagtcacagacctgcccaatgcctttgatggaccaattaccataactattgttaaccgtgatggcacccgctatgtccagaaaggagaatacagaacgaatcctgaagacatctaccccagcaaccctactgatgatgacgtgagcagcggctcctccagtgaaaggagcagcacttcaggaggttacatcttttacaccttttctactgtacaccccatcccagacgaagacagtccctggatcaccgacagcacagacagaatccctgctaccaatatggactccagtcatagtacaacgcttcagcctactgcaaatccaaacacaggtttggtggaagatttggacaggacaggacctctttcaatgacaacgcagcagagtaattctcagagcttctctacatcacatgaaggcttggaagaagataaagaccatccaacaacttctactctgacatcaagcaataggaatgatgtcacaggtggaagaagagacccaaatcattctgaaggctcaactactttactggaaggttatacctctcattacccacacacgaaggaaagcaggaccttcatcccagtgacctcagctaagactgggtcctttggagttactgcagttactgttggagattccaactctaatgtcaatcgttccttatcaggagaccaagacacattccaccccagtggggggtcccataccactcatggatctgaatcagatggacactcacatgggagtcaagaaggtggagcaaacacaacctctggtcctataaggacaccccaaattccagaatggctgatcatcttggcatccctcttggccttggctttgattcttgcagtttgcattgcagtcaacagtcgaagaaggtgtgggcagaagaaaaagctagtgatcaacagtggcaatggagctgtggaggacagaaagccaagtggactcaacggagaggccagcaagtctcaggaaatggtgcatttggtgaacaaggagtcgtcagaaactccagaccagtttatgacagctgatgagacaaggaacctgcagaatgtggacatgaagattggggtgtaacacctacaccattatcttggaaagaaacaaccgttggaaacataaccattacagggagctgggacacttaacagatgcaatgtgctactgattgtttcattgcgaatcttttttagcataaaattttctactctttttgttttttgtgttttgttctttaaagtcaggtccaatttgtaaaaacagcattgctttctgaaattagggcccaattaataatcagcaagaatttgatcgttccagttcccacttggaggcctttcatccctcgggtgtgctatggatggcttctaacaaaaactacacatatgtattcctgatcgccaacctttcccccaccagctaaggacatttcccagggttaatagggcctggtccctgggaggaaatttgaatgggtccattttgcccttccatagcctaatccctgggcattgctttccactgaggttgggggttggggtgtactagttacacatcttcaacagaccccctctagaaatttttcagatgcttctgggagacacccaaagggtgaagctatttatctgtagtaaactatttatctgtgtttttgaaatattaaaccctggatcagtcctttgatcagtataattttttaaagttactttgtcagaggcacaaaagggtttaaactgattcataataaatatctgtacttcttcgatcttca

SEQ ID NO: 419 - DNA, 1746 bp, Homo sapiens
cccagacctcgggcgcaccccctgcacgccgccttcatccccggcctgtctcctgagcccccgcgcatcctagaccctttctcctccaggagacggatctctctccgacctgccacagatcccctattcaagaccacccaccttctggtaccagatcgcgcccatctaggttatttccgtgggatactgagacacccccggtccaagcctcccctccaccactgcgcccttctccctgaggacctcagctttccctcgaggccctcctaccttttgccgggagacccccagcccctgcaggggcggggcctccccaccacaccagccctgttcgcgctctcggcagtgccggggggcgccgcctcccccatgccgccctccgggctgcggctgctgctgctgctgctaccgctgctgtggctactggtgctgacgcctggccggccggccgcgggactatccacctgcaagactatcgacatggagctggtgaagcggaagcgcatcgaggccatccgcggccagatcctgtccaagctgcggctcgccagccccccgagccagggggaggtgccgcccggcccgctgcccgaggccgtgctcgccctgtacaacagcacccgcgaccgggtggccggggagagtgcagaaccggagcccgagcctgaggccgactactacgccaaggaggtcacccgcgtgctaatggtggaaacccacaacgaaatctatgacaagttcaagcagagtacacacagcatatatatgttcttcaacacatcagagctccgagaagcggtacctgaacccgtgttgctctcccgggcagagctgcgtctgctgaggctcaagttaaaagtggagcagcacgtggagctgtaccagaaatacagcaacaattcctggcgatacctcagcaaccggctgctggcacccagcgactcgccagagtggttatcttttgatgtcaccggagttgtgcggcagtggttgagccgtggaggggaaattgagggctttcgccttagcgcccactgctcctgtgacagcagggataacacactgcaagtggacatcaacgggttcactaccggccgccgaggtgacctggccaccattcatggcatgaaccggcctttcctgcttctcatggccaccccgctggagagggcccagcatctgcaaagctcccggcaccgccgagccctggacaccaactattgcttcagctccacggagaagaactgctgcgtgcggcagctgtacattgacttccgcaaggacctcggctggaagtggatccacgagcccaagggctaccatgccaacttctgcctcgggccctgcccctacatttggagcctggacacgcagtacagcaaggtcctggccctgtacaaccagcataacccgggcgcctcggcggcgccgtgctgcgtgccgcaggcgctggagccgctgcccatcgtgtactacgtgggccgcaagcccaaggtggagcagctgtccaacatgatcgtgcgctcctgcaagtgcagctgaggtcccgccccgccccgccccgccccggcaggcccggccccaccccgccccgcccccgctgccttgcccatgggggctgtatttaaggacacccgtgccccaagcccacctggggccccattaaagatggagagaggaaaaaaaaaaaaaaaaaaaaaaaaaaaaaaaaaaaaaaaaaaaaaaaaaaaaaaaaaaaaaaaaaaa

SEQ ID NO: 420 - DNA, 31737 bp, Homo sapiens
gaattctcttatagaccctccaccttgagcaagccacataactcttactactattatgtgatttttggtggtggtgatgtgtgtaggtgtgggttttgtgaagcacctggcaagactaatgttctgagggacacccttgaagtgttggttcattggcacctgctggggcagcccaggtgatcttccagagatcagacagagatcttgggcagggcagattacagcagaccctgctgccttctgatctccctggaggaatgggaggaaggctttcctcctcccaatgccaagccaaccaaccttcagcattctgaattctggggctccagaccccaggtgctgggggatagagattgatggcctggttgtatttcaaggttgttcctgaataaaacctccattcaggtatttatttgggaagaagagagaagagccagtgctgggagttgggattgcgcctttggccacaatgaggaggaaaaatcgctgcaatcaaagtgaggaggagtgcttagaatttccacgggcagcaaggtccaaggcccactcccacgtggccccccacaccgcgggatggctgctgtgatcccaggaaatgggtgttgacctcacagcttgacagcattggtgaaaagtccttgtctttcagctaaccctgacagcaaaggaccagccatttagttttgaaatggaccttgaggaattcggagtgaacaccccacaggcaaccgagatggactgaaggtccccttgtaagtggagcaggggcttgcggtgcatggtgtctttgaagcctcacacccgctcactcgcccccggaggcaggtcctattatcatccgagatgaagctgaaagagataaagtcccttgtccagggccaccctgctggtgaggggaagagcctcagtgtgcattggggtacgtctggctgggtctccaggactataactgctcgagctgagcagcctccagctggggaagcatcagaccagatcccacccaccgaggagcctgggtgggggaggatcttcatgttggtcccagggcacagcccctcccccacccaggatgtgtcattctcacaggggcagccaggggtgaagggtaagccggccgggggcggggtgggaccagggagggtgacgtcaccgccgggcttagtaatgctttggcagagcctgaagctcccaccttgggagggaggggaaggaggaggggcatcgctggagccagcatccaggaggctgccaagtcggtgatcagggacgggcaccctgccaggagcaccccagaccaggcctcctgggaagggggggactctgggagaggagagacactcttggtgtgctgggaggggaccctgcaaagcggtgtctgtatcagattgagtgcagagtgatcctcggactgtctgtccatctgactggcaaggctggcggccagccatcccctgatcaatgcccaactgtctgaccgcctgaccgttgagtcccgtcactggcagatggactgcctgactgatttacatgactgatgcttggaggagccatgaaggatgggccaaatctctgtccacatccgtgagaccctgggctaccctctgaacctgatgccacctcttataaacacccagggtcaagcgaaagaagagagaaaattagcatctactgaggtttatcaaatacccagccttgggccagatgctggagggacacagccaaatctgacagggacccgccctcaggagcccacattctagtaggggagacagagtcacagccgtaatgacagaaaccagtgcattagataagcaaaatcaggcgaaagggaaaacagctttattcttgtcacccaacatttttattttttatttttttttactttttatgattccttctccggtggaagttcatccccccattcctggatgaaaactcgggcagccccacaagttttctgcccccggttaggtgataaaaattcttaggtcactttaaattgcaaatacagagtcaggttggcattaaaagtgtctggtccgaggtagtaactgcatctttgaacttggttcaaagctaacccttctttctgcccttgctgccctctgcaggcagcaagctggagaaggggcttggacctactttgcccctgcacatgcccttgctccatgcccctcttcccgcatgttgctacagactgagcacccctaattcaaaaattcaaaatctgaaatgctccaaaattcaaaactttttgagtacccatggcatgacactacgagtgtagaatattccacctaacctctgctttctgatggttcaatatgcacaaacttggtttcatgcacaaagttatttcaaatagtgtagaaattacctccagactatgtgtggaagatgcatatgaaacataaataaattttgtgtttaaggcttgggtcccattcccaagatatcctatcatgtatctgtaaatattcccaaatccaaaaatatcccagatcttgtccgggcacggcggctaatgcctgtaatcccagcacttcgggaagctgaggtgggtggatcacttgaggctaggagttcgagatcagcctggccaacatggtgaaaccccatctttactaaaaaacacaaaaattagccgagcgtgatggcgtatgcctgtaatcccagctacttgggaggctgaggctggagaatcacttgaacctgggaggtggaggttgcagtgagttgagaatgtgccgctgcacgccagcctgggcaacaatagtgaaactctgtctaaaatatatatatatatatatatcccaaatctaaaacacttctggtccagacattttggataagggacactcactctgtatttgcagttccggggctgccagggcatagcccagaagggagaggagtcgggaaggaaaggttttgtctcaccggtcctgttgtgggatggcttctgctcacagggcccggcagggggcagggctgactctgtggattcttctggacgcctccttcctgtcccgggaggctttggctgcacttcccacaccgtgggccaggggcatcctgtaggtggctgctgcccgctctaaccctggctttccatgcccaccccacactcatgctctgctgtagcccttcccagatttacttgtccacataattctgaagaggaggaggaggaagagctgtgttttgtcaaagttcttggcagaccaggcccatgtttgaaccccagaaaatatacttgttttctgcactctgttgaactctggggaatcccagccaatcccacctcagatctatcttctgtttattcctagcagatagcagccccttgctggcctttttagattttcctggtgggagccaactttgtctaggcttctgcatccccaactcactggagacacacgttaccatcttctcataatccactgggacgctctaaccaagccatgagaggggcaggcatttccaaaacagcccctcataggggctggaaatctaagcatccccagatctccctccaaagaaatccttttgaccaaacgtctccttctctctagtcacttgagcttctgataccctcaacagtcgggccattagcctgttctcggcccaagcttccaccatggctcttattccatgataggacccctcatttccccccagctgcattccttccccagggtccccaagcccaggaaatacaggcttcagcatactcagcggctcaagctgtatcttggcgtctttgctgactcttgcagtctaaccccagtgtgcccttttgctctggatttgcccatctcacacctctcagccttggcacttgctgtgtcccctgccttctctctcctccagggcctggcgaatgtggctcacctttggctgtccagggtggctctcggtctcctgattgcaaatccttcctgtctcccaaaatagcctgaactctaaggttgtggaagtgctgccctctccggagctctggggaggctccctgggtcctacagatctgagtttcatctgacaacacatatatgggcacgctggaactcacccattcatttgctgagcacctattacatgccaggcactgagctaggcactcaggatacagtagtaaagaatcaataacatccctgtacacactcaggagcccccacagcatatatgtggacacacacacacacacgcacacatgcacacgcacacagacataaacaaagaccccagtttacaacaggtttcctgggggctggacttcataaggcctaagttcatagtcaatatgtaacaataaaatgtccctcttggccaggcgaagtggctcatgcctgtaatcctagcactttgggaggccaaggcgggcagatcacctgaggtcgggagttcaagaccagcttgatcaatatggagaaacctcgtctctactaaaaatacaaaattagcttggcatggtggtgcatgcctgtaatcccagctgctcgggaggctgaggcaggagaatcgcttgaacctgggaggtggaggttgcagtgagccgagatcgtgccattgcactccagcctgggcaacaatagtgaaactctgtctcaaaaaaaaaaaaaaaaaaaaaaaaagtccctcttgctgccttctctccccgcgcctgtgctgggccgaaaacaggaaaatggcccgcctgtgctcaggaggtgggaggcagtgagatgggcattgtatgttccaaatggcctcactgagttctagtcctaatacctgccatgcgactccagactggccacccctcctctggatcatgatagaaatggcagatgctgctgaccatcatcgacccctctttcttctccttcccccagcccttctaggctggggcagctctccttccagagcgtaaggtgccacctccaggcaaggcccactgggctaatcccaggcctgaggttttgtcctgactgggcctcctttagaaagtgctgccccccatttcctcctaagcagagtggacagaggacatcatgctcagggtgtcctttcccccaggggcatcctgattcataggacccttgtcacacactggggctgcagccaccttcctccaacttctagaggtggtcattgtgaggttggaggctggagccccatccttttgggccactggtggcaacacccctccacctctcctcttccttccctggaagactggcacccatcctcgacactgcctccatgcctcctccttcaggaagcctgccaggtctctcttctatctcagactggaggaaccccggcccaaccctctgagacatgtaagcagtatattcacttttctcctctccaagctttgctctaagccagcacttctcaaactgcccgtgtatctgaatcaaccgaggtacttttaaaagcccagatttccggccaggtgtggtgggttacacctgtaatcccagcactttgggaggccgaggtgggcggatcacctgaggtcgggagttcaagaccagcctgaccaacatggagaaaccccatctctactaaaaatacaaaattagcctcgcgtggtggtgcatgcttgtaatcctagctactcaagaggctgaggcaggagaattgcttgaacctggaggttgtggcggaggttgtggtgagctgagatggtgccattgccctccagcctgggcaagaactgggcaagaagagcgaaactctgtctcaaaataaaataaaaaaaaagccctgatttccagagcacccccgccccgacccaaagaacaagaatctccagggctggggccccagaatctggatttctagcagaaggcacagatgattattaggtcagacaagtacgggactcctctctaaaagaactcaatgttgcctgagttctcttctgcatcccattatttcattctgctactgacaatggggcccgttatattcattcattcatttatccaacaaatatgcattaaatgctcattatatgccaggcacatgctccaagctggggacagggcaaggaatgaaccagaagccctccctgccctcgaggaacttagggttcagcagagaagacacagacttcaaccagcaatgatcattgactatcaggagagcgccttttggggggaaaatgcccattgggcatggagagcttgctccacatccacagaatttctttcttttttgtaattactcaaaaaggcttcattttgtttttctttagctttctgaactaaacacgctgtgcttgttgtgccttcaacactttcccaacaatttcctgctccaccataaggaaagcacatcgactcctttcccagacacattcagcacgtgcgggaccaccatgggccttgctgatgtgtgttttcattttagacaacctcataagaactgcggattctgcctgggcacacaccacatgcagatttcagtgccttccagaccatcttggcataaaagtaaacaattctattgccagggactcaggacaccgaattttgttagaggctgtatcataggaaagcctacaacggtgtgttacacgctgggccatgctgactgcctaaactccagacatcttttaaaaacctgacagcttttctaagcctgaacctgtgctaaatcacttagtcctggaaacaaccctatgtggttgggaccattattatgctcatttcccagaggagggactaaaagagagggcagagtctggatttgaacccttggaccaggcatttgcacaggggaggccctccccacagagagggcggcaggagggcaaggccacctctgtcattggggccatggtctggggagctccctgaaggcagatctgagggaggagaaggagttaggtggaagaaaaaagggagattgttccaggaaccagaggagcacagctcattgatgatggagatatggcagaggagtttagggcactaggagaccccaggggtcagcaacttcatccagggcatcaagcaagccagtgtggagcatgacctgacctgcagcccatgaatcgggcagggcgtctgtgcatttgcgggtatgacccaccctgagaaaggaggctggtagccacgaggctgagcccctggactgggagtcagggttgctgagtccaaaccttttgtggtcactcactcaccctgaccctgggcaagttacttaacctcgctaagaattcaggtcttagggttattgtgggaatagctaagatcatgtgtgcaaattgctgaacacttaataaattcatattggtgtctgtgtggttatgtggctctgagaatatttctgttcagtttcaagatgaggagacggaggtccagagaggcaggtgattggtctaaggtttctcagccagtaagggcctccagggcagggatatttccagcacccaacttgccccaggggaaggcaaccatgtgtgattgcaggatagtgggttccctcagtgcctaaaagacccccaggcctctcagcctttcacctctgtatcctcctgctcccacacaccggtgagggctccatgcagctagactctggtcaggacatctgggtgggggcctgcttccagtctgaaagaggaaccctgggtcaggggtgggctctgggacccttgagagacctgtggctaagccccaactccagagacgtgatggccctgggaggagaagacagcctgggtggactctccctgaatttcccatttgtaaacagtgcagccggggaggggtagggcccagtgcccagtgcctggtggtggaagatggcagaggtccagcagctaagcagaggggcgggtggggatgagcgatggctgtggctgtcagctgcggacacaagcgaagcaggctggagcctgtggctatttctcctccctccaggacatgcgacctccttggccagctcacagcattacccagagcttgagcctgagcaccatgcccagcccaggagccagccagctctgagagtcagaggacattttccaacagccccactagcctttctcctctccacattccagccccctacctgccagacacagagcccaggggaagtttcaaaatcccttttttaaaaaagccacagctgtggtgatagagcaagaagagaccctgtctgaattcagccaaacctagagttgaatcttgttttggtcacttatagttaagtgacctcaaggtggccacttcacctctctggaacctcagagttttttcggctgtaaagtggggataatcccaatgacccttgtgttggtgctacatgggctgagtgagaacacaccatagggacccagaaaatgtgtcatgaaagacagaacactctgaaattagcacatagcaggccctctgtaaatatttactgattaaatagcaggtgggatcaaaaagaaataaattatcccttcatctgtgtcttttgtctttccctccagaagcccaagggaattagaggcattgactgggggtgagagaagaacagggtgagacagggcataattcttggggacggaaggctgagaacattcttaatgatgtcagctcccgtgtgcagaatacattacagtctctcaagtgatgctgattctctctgacattaaggctcctctggaagggagattcagacaccgagcccatgaagacagattttaggttctcatctgatctctgtctcttactgttcagcaaccttagaccagactcatgtctcctctgagcctctgttttcttatctataaagtgtgcatccaaataccaactctcagggctattgtgaggattaaatgagtcaggggactcatgcaatgtatgtcaagtgcttagtgctgggcctggtgtccaataggccttcagcaaatggtagctgtcattatgattacctatcctatcagttagctattgctgtgtaataaactaaccccaaatttagggcccgaaacaaccaccatttgtttagctcatgattctgtgtgtgtgtcagccatttaggttgggctcagctaggtggctcatctggtcttctcttgcgtctgaagttggctgcaggtagggtggtggttctgcttctgggggtaagttggctgtcatctgggatgatggagtactgacccacttgcctctcatgctccagcaggctaatttgggcttcttcatgaggcagtggcaggttttgagagagtgaggcagagagagagaagaagtggggagaagtgtgcaaaactccttgagacttaggattataattgacacactgtgttttcccccacattccattagccaaagaaggtcacacgaccagccatcagagaggtgctagctgtatagtcatgttgcagagagcatagatacagggaggggaatacatgtgactatttttgcaaacaatgaccacatgcaactaattaggggacatctgagacagaaccaagtccctcaattcccagtgccatgactcccaccctagatgctcactctgccctgtgacactggcaggaaagctggttgctctcccacgtggctttcccactccattctccattccccagtcccagccaggctgccaccttcacattccttttctgaaggagatggaaaccagactccatatgggaccaggcacaggcatcccacacatggagtcatgggggtctgatgacctgcatcccccatagaccgatgcaggatggagtccttgccctgctcagtcctcagaggaaggaaatacacacagcccacctggacaacccctctgccccagctgtctgttaaataaactcattaagcaatccctgacgaggcattttagatcatcacaagctacagatagtttccgttggcctcttggaaaaggttttcctgaccacatagacaggaggcccagatcagttccccttgtgggtagggggtgcctggttctcatttgcattcacactgtgattggttcccgtgcatcctcttgaactctgggccagtcagcccatgggactggattcattcctccatgtcctggtggagtggcagcctccacagtgccccgggcaatgaggacatcaagggacaacagccagcctggggaccggcttgtcttaccttgtgcacttcctggcaggtagagacagggccttgatcacctttgctgtcctctctgtccctgacatggggcgctttttctgctgtttttgtgtttttttccctgtgcctcccccacaactggactgtcagctccacaaacttgtttaccttggtgacccctgattccttccacagtgcctggcatagagtgggtgcctgataaatccttattgcatagattgatggaggaaaagttgggtttagtggacttgtgcctccttagaaaaggcctactcctctcctctttttatgaaccaggggtcttcattcccattggccttgagaactattggaaagcacacagagtcacaggccccaggggccaaccccagtttcttcagtcactgtgactctggacctgaaggtggatttgtgaatccaatgtgaatgactcctggattgtgtagttggtcagggctatggcaaacagcttagcttttccaagttttggtttccacactgtaaaggggtggggggagcaagtgtgtctacactgttggggtgtcagggttaaagcttaatactaaatccttggtggctgctgtgacgatgatgatgattgggaaggagacagggtcccatggctgctggggtccaccatgccctccgcagtggctgcctgcactttcctcttgctgccctgctccctctttgcctgctgcgagtcctacctcaccccaaagggtcagccctgctcatcttcctagctcccccagctgcagtcctgctcatagcattattcttactcccactctgttcctcccctctgtgggctcccttgggtttagagcctgcccctctggggaagggccttgatatggttgggctctgtgtccccacccaaatctcatcttgaattgtactcccataattcccatgtgttgtgggagggatccagtgggagataagtgaatcatggggcggtttctcccacactgttcttgtggtagtgaataagtcacaggagatctgatggttttatgaggggtaaccccttttgcttggctctcattctgtcttctcttgtctaccaccatgtgagacgtgcgttttgccttcttccattattatgaggcctccccagctacgtggaactgtgagtccattaaaaccctttcttttgtaaattgcccagtcttgggtatgtctttatcagcagggtgaaaatggactaatacaggcctctctccttccattttaccagacccccactgacccaccaagtgggttcctcgacagcttccccatggaaagaactcagacaccaccccaagcgcctgagtcctctatgaaccaggaccaagaggattgggtgctgggatcacagggcccctgtcaccctggaagccccaagctgggctcacccaggtgtgtgatgcaagggcagaggatggacccctccactcctatcagctgccactaacatcccttcccgcccactcagtcctccaagaggctgctggagactctccagctctctccttccactccccacctccacacagcccctctgcactcccagctgttctggctggccgcccctctgcccccagcatcctgcaggaagcccactcctatcccaggggctactgcttaaagcatctgaggtcacttggggagaggcacttggctctgggcctgacattccccttgctcagaaggcaggtgctggggaaatgatgtcagatgggacagctgggggccggggtgctcacagctcagatgtcctctaatggccctcctacctgctcaccttcccactaggcaagaggctgagtacaggtcttacctgccccagccccagccccttgggccaatcagccatccctgccccggaggcaccaaggcccaaagtcctcccgtgggcctcattcctactcagggaaggtatcccccagaggatgggaaacctccccttgaagctggggccagtcctggaatgggctgcttggggaatgagctcactgtgtacgtgaccgcatttggctcccacaacagcactgggagtgaggaatgagagtccccattttcccgataagactaagagaggtgaagttgcacagcctgtcacgtccagtggcagctgctctgattctatttgatttcagttgggaaggggattgccagggcaatggctgattcctgcactgtggcaggggcgatgagcacttcctcctactttcctgtttgttcgacgcgctgttcattctacttccttccacaggaaggggccttggatgggccccagggatcccacagcagcacttggctcagactgtgctgtcagcagtcggcagtgtgtgctggtacgtacctgtgtacgtgtggcagggtgtgctgtgtgcatgcgtgtgctgtgtgtgcacgtgtgtcctggtgcatcagttgtgtgcaagagtctctacactcatcagaatgcaggtgccatgtgggcagggggtttgtgtgtgttcactgctgtgttcctaagatcctagaactgtgcttcacaaatagtctgtgccattaagtattcatgggatgaatgaatgaataaatgaataaaccttagcctacagcctctaaagaccccagagaacagccagacatttgccccgaggcagcgtagcaacctgggtctctgtccttctgcaggggagaaaggcgatgggagcgctggcccaggagatgcctgttggctagatgctccagcgtcaccagtgtgcccctccacccggctgctctcagcctgggggacctgctcacctggaagatcatctggggcagaggctggaggcagctctgctaggagacaggatggtgatcagcggcagagggggctctgcagtgtaggcccgggaaggccaggcaggaagacacttggctttccctgttcactacgggccacccatggcttagtctcagggaagaagagctagggttcctcccagctgggaatggactgagccctcaggggccttcagggcctcgagtgtgtgcgtgtgagagagtgcatgcatgtatgtgcacatgtatcaggctgccattcaccagtactcacccagccagccataccagttattatgaataaaatggagaaatatttccacaccagttgaaaattcccccccagctcaatctctcagagctcctgcacctcccgccaatccatacgtaaggatcccattccagctcaggcctgacttccatacctattggtcagtggccatgccaatcagtgccccccaaagtccagctccctgaacacatcctaggcactgtctctaacctcccacgggagcccaaagagcaaccctttgctccagccattcttcctggctgccccagggagctgtgggtgggcactgccaaggagcacccttgtactctcctccacatggtacccatgtgccagtcctttgggcctgtcagggcccttggcaggagagatggcagcccacagagggcccagggagggcagctggaaggtgtggaagccccagatgggcatgggacagattagtggctgcagggacgattctgagtgttagacatgggtctatgttccctccctcccaaaacctcacaggctgggagtaagtgggttgctgaaactgggtgctccccaggaggttgaaatgaggaacccagcaggctcagagctcacagtgaccagatttcacaaaagcgagggtcagagcctcacactacacacgtcctggggctgttctgggaaatctggaagggcaggagccagtggagccaggaggatggtctttgaagtcagatacgtggggttcaaatcctggctctggccccttccagctgtgagctctgggcaggatggacgtgtcagaggaagcagcccaccccttcgctaacttctgacgttttctcagtcctctattttgcaaacagctttgagcccaccctcagcctgccaggccccgtgtcgcacaggaagatggagatgcagctggactcaaactcaggtccccttgctcccagtgagaaagcatttatgaaaagacacccaacagctctctgctacccttcctgagggtggaagctgtggggggccagggaagtcaggccaggtggaaccatcgacattttcctctcctgcccccatcccagagggaggcgaccaaggccacagagggacccacagccgaccccaccgctgacacctcctcagctgccacattcgctgagaggtcatcacgtggcttgggacagacattactccaggtctgaaaatcttccggaatcaacgcaaaggggtgcaaataggcagattccttgtccccaccctagatctgcagcgccagaatccttgagccttggaatctgcattttcacaagtgcttccactggagtgggacgctggcaggccccgcgttggcgaaactgggagtaaccacggaacctttgggctctgccgggctcctaggctgaggctgcagcgccgcctggtggtccctgctgaaacaccactctagccgccgccccgcctggccccactgcagggaggcaagagttcccctccccactggctccagaaatgagagaaggtggggcaagtgccctctggacttcatgacgccgggcaaggggcatgctggggctcagtcgtcagagccgtgcacaagtaagagcaagcttctttttctttttctctctctctctctgtcgttttctttttcttcctttcttcttttttgacagattctcgctctgttgcccaggctgaagtgcagtggcacaatcttggctcactgcaacctccatcccccgggttcaagcaattctcctttctcagcctcctgagtagctggcattacaggcgtgcaccaccacactcggctaatttctgtattttttggagagatggggtttcaccatgttggccaggttggactcgaactcctgacctcaagtgatccacctgcctcagcctcccaaagtctcacatttcatcttaaaaagtcccctgaattctgcacatcttactccatcacatttctttagtatgaaaatgtttccttccacaaatctttgcagaaacggatgctctagaaagcgatgccaagtttatcctgtggcttccctgtcccccatcaccagcccacttttgtgcagcttctgggggcacccataccctagtttcagaagcaggaattgagaggtacaatctatacctctcttagcaccaaatcaaactccaggcaccccggcatgcaggcaggcccatcagagcctggcccatcacggtcctaaggttcaggctgcagaagcagatgcctgcggggagggcagagcagtgaggggtccagcagtctccagcagacccagccactctgctcacaccctctgccctgggtcctcccctgccccaggaagcagcatccctaccattccagactagactgttataaatcctctttaatagtcttagaatcttgagtgtgttttacagaatggtgcacacaaagccccctcccctctccccctacaaggcacagcctcacccaccccactccccaggggccagaggaccgcttgccaagaaaggccagcccaccttctcccaggagaagccatcctcctcctccccgcccctggccagctccggaccctggagaatacaggaccagctctgtgccatgcccccaaggactcacctgtccctaagcagctcagggccaagccagatccccttacccaggcagaccccctccagcccagctcccctaggccgtgtccctagggcatggcctaggctaatctgagctgtctagatggacctgcatcaggcctggggaaggggtgccaccccttaatatcaggtaaaacccaccctctcccctctcccactgccttcaatataattgtgaaaaataaagatataaatgtcatagtgggaaataagttgacccacccagtaggcagtctcctgacagcccagagtgccttatctaacgcccttccctccccaattttttttttttttttttttttttttgagacggagtctctttctgtcccccaggctggagtgcagtagcacgatctcagctcactgcaacctccgctcccgggttcacaccattctcctgcctcagcctcccaagtagctgggactacaggtgcccgccaccgcgcccggctaaattttttttgtatttttagtagagacggggtttcaccatgttagccaggatggtctcgatctcctgacctcgtgatccacccgcctcggcctcccaaagtgctgggattacaggcgtgagccaccgcgcccggccccctcctccccaatttttcatacagttgcccctatacaatatacacacccttgagggcaggtagaagtccagcccacctgcgccagggacgctgtggggagcatttttctctgagttgctaagagaaccctgatgggcggtgagcagaggaaccacagaacagccagggctcaaggctggcagcggataggccaggagagatcgctaggccccagaaagccccctactttcagtcaggatgggcaagagggtcttcgcagtgaagtgggaggcaggcctggaggagggagccagggagacccctgggagccctgaggttgggggccaggcagggagatggggatagcagctgcctcagtacttggggaccttgctgtagtcttcggaatggacgtgccggcacaagcagatggacaggaccatccccaggagctgtggggagaggcggagagtcagagggaggctgggtgtcccggcctcagacgccccagcctcaccatccaggtttacatggggattaagtggatcctcaacttgagcctcacaaccaccctgtgatgcaggcagcagagggaggcccagagcggggcagtgccttgtctgaggtcacacagccagacagtgctcagaccagagggcctctggaagctgatggggtgctggcccccttggccaccacctccccaaggagatcagcagaacagagacaacccaggaggacctgggatggagaagggatgggggagggggctcagacctcgatgatggccacacccacgcccacgccgaggatgatgcccaggttctcctgcagccacgcctgcaccttctccatgcagccctgcaagggcagaatgcggtcacatcaccccgctctgcaccatcccaccccgccatgcagaaccaccgagagccccccagtcccagcccggaagcccctacagagggctctgcctgttccttgaataaatacattaacaaagaagtagatgaaggtacaaatgacagatgaattaagggaaggaactaaatgcaggaaggaattgctgagcagtagcccagatggcccccaacgccctcggagccccgcccccgatccgcagccccccgcacacctcctggtacacaggccagtcctcagggtggttgccactctgggtcctgttgccgggggcctcgcagaagcccttcctcacagaaaggctgttgtcctcttcccccttgacttcgcaggaacaggggtaggtgacctcagggcgattcatgagctcagcgttgtctgtccagttgtagaagctgacccagccgcagcacttcacctgggcaaggcaggggacagactgcttgtgctcacggctcaccctaggcaggctgccctcctggcagagggaggacctccccaggacagagactgagatatgccacttccaggcccctggtcccagccgaaccatcataaactacaagtacagcagaaaaatcaaaaccaggaccagcaaaaatacaaagcagagtaggaaggaagttcaagttgaaggagcgcaggtgtgcagggcacaaggagaatggacggcagacagttcacagtgcagggtttaaagtcaggctactgggttacaatcccagccctgccgcctaccagctgagcaacctccatcaaggaactagcctcagtttcctcatctgtaaatggggataattaaaatccccaactcacagggctatcacaaggactaaatgggatgaggcaggcaaagtaccaagcataggtgtggggagcacaataagcttaggaaaggccgttcaactttagtgcaggagttgagatttgcctctgagcttcctggtgaaaaggaaaaaaagtgaaaagtgaaaaaggagacggggtcaattccgccttttttttttttttttttttttctgagacagagtcttgctcagtcacccaggctggagtgcagcagcgtgatcttggctcactgcaacctccacctccagggttcaaacgattctcctgcttcagcctcctgagtagctgggattacaggcactcgccatcacgcccggctaatgtttgtatttttagtagagacggggtttcaccatgttggccaggctggtcttgacctcctgacctcaagtgatccgcccgcctcggcctcccaaagtgctgggattacaggtgtgagccaccttggctagctggtcaattctgccattttaaaggagaaaatgctctagttctagagagaagaaagcctttccgggctctgtgtgctaaaggaggtctctgtgtgtgaatccccgcaatgctgggggttcctgggaggattcaatgggatagccacggtcacagcaggggtcagttcctggaccgcttccttcctagctccgaggggtgtcgcctgaccagtagccagtggccagcagggggcgtgccaggcacactcagaaatgctcagctccaggcagtttctaatccaggtttacaggtgcttgttccagcagccgggctgcctcctctctccaagaaaaggctggcacctctgaggggtgcacaggtctgcaaggctgggggcacccacaggccatcctacaccagagcaaaatgaggcaggtctccttggcccgtctacgacagagcctccttccaagcaaccccttggcctgactccggctgtacctggtccccagcagcacacgccacctccgcctgtgtctccatggatgtgcatggtgactaaaacatcaccaccaacataccacataataaatgctgcctaagtgcttcaggctttaacaatgtatctcacacggcatgggtcagtagccccattgtatagatgaggaagcaggctcagcaaaggtctagcggctgtggcagtgttagcactccaggccttgggagtctgacttaccaccggcctaagcagcatctgacagcatcagaatcatctagaaccagccaatgactttccagggtaggatgcttaccacctcccaagggacccacttctcctcccaggtcccttgtcaggtggcactggtttatgtcactggtgacatccagactttgctaaaattagcaaagtctcagcaattgtgggtcaaactacatatgcgaccaaaacatttccttgtgtgcaccaagccttccagctgccacaacccccacacctgatctcctcggtcagggccagaaaacatcgctctccccttcctccactgagaaaatggccatgtccatgtcacctagatggagtgtcctctctgcaaactctcctggtgccgctgagtcaggctttctcctgctgcccatgccctttgtactccacatccctcccctgaggtgtcaacaggccctaagtgaccactgtgtcctgcgccctcacaggattgcagatcagagatgtcaggtcccagccaagggcacatgcagcatccgggaccacaagaaaggagagccaggtggtcattggatcactattgagacaggctgggaacctggtcagtctatctgttggtcagtcggtcagtccgtccgtccatctgtccacccatccatccatccatctctctcactttaatggaggtataatacacatgaactaatgggcacacattcagcttggtgcatttttacgtatgtgcacatactggcgaaaccagtatcaagatttggctaaaatactccttttgccctagaaggctccccaacacctccccagctagtgcccttccccagaggcagccttcactgggacttctcagcatatcagccttggctcccagtttcctaaaacccagagtggagctcccaacgctccccagtgtagcttgagataagagggctgacaactgcccccatgctctctggccacaaatgggagcacagagctgtgaagctgcctctgagtctctgggccccctgagcagggagttgtggtgctaactggggtgccctgcccccatagaagcacactctcctacaaactgtcaggcacacacgagcactgcagatgccagtcccagacatgtgggtgcacagagccccaaatgcagggacacccaggccagagagcctcctgcagccccgccccacctcacctgagcctgcacgtagtcccaggcatcctgcaggctgtcctcgcgactgctgttgtagtctcgaatgagctcagtcacgatgccgcccatctcctgcttcagctgcaggggggaggacaaaggtcagggtcagatttcctgaaacccgtgcccacctgtggtcacccctacttaaactgcctccccccgttcccctcagcaaccctgggacacgctcatggctccagccactttcctggcgctcccagggtgcccgatgcaggcagtgccaaccactcctgccccactatctcttctgcgcttggcagcagcctggccctgtaaacatcaatattctcatgtcactgctgaaaaccccgtaggggcctcccacctccagggcagttcccaccgtcattgtccccataacagcctaggaggtcctacaccacttgtctgcctccccaggccttctgtcctctgttcttcctccctctgcttcaactgactagatttctgtgctgtctttgtgccaggcacactcctgccttggggcctttgcacctgctgttcccaccgcctggaatgctcttcccctagacattaacatggctcaccctctgcttccttcagggctctgctccaatgtcacctcctcagaaaggccttaccagaccactctacaaaatatcagcccttccccatcccctctcccccaaccaatcaaccacccctccccggcctcccttatcccacaagggaaagcatgctgtatttctctttagagcactgacgttacatgcttgttggttttcagggcttatcatctctctccactagcacatcagctccgtgggggcagggaccacatctggcacgctcactacagggtcccccgtggctagcgccaagcctggcacagaatagttgtgtggggtacgtgaatgctgaatgcacacctaaccaccatggtctgccaggcaccagagccagacccatgcaacttcttggtgaatccttacacctcccacagggcagcttcagggagaaggagggacagggaggaaagcccagctcagtttccttcttccaaggaccagagtgcagcctctccaaacagggcccccaagacagcagggtagatgcctggagggggccccaagactgagggacctggaacttcggtatcaactatatggtcaaaagatcctccctctatgtagtcatggtggtgggtgcccgtaatcccagctactcaggaggctgaggcaggagaattgcttgaacccaggagatggaggttacagtgagtcgagatcgcaccactgcactccagcctgggcgacagagtaagagtccatctcaaaaaacaaaaaacaaaaacaacaacaaaaacaacaacaacaaaaaacaaaacagaaaagatcctccctcaccccttcccaagccccaagccagcagtgccagccagccggagtgtgaggtcagttgcctttctgggacctggctacttgccccagagctccaaaaacatctcacttttttttttttgttttgctttgttttgtttttttgagacagggtctccctgtcacccaggctagagggcagtggcaggatctcagttcactgcaacttctgcctcctggggttaagcaatcctctcacttcagcctcccaggtagctggggctacaggcatgagtcaccatgcccggctaatttttgtatttttagcagggacagggtctcgccatgttgcccgggctggtctcgaactcctgacctcaagtgatccacccagcccagcctcccaatgtgctgggattacaggcctgagacacctcgcctggcccaaatctacatcttgcctatgctggtcctcaccctgctcaggaattaagggttccttcttgtggtggagagcagcacctgctctcagctaaccccacagagaaaacactgatttacaaagcaggcagagaaggggtttctaaataagtcagttgtgcaaaaggaggcaaacccagagcccgctgagggcagggcctccctcggcgataagcaggcctgggtgggaggggagcctccgagagccagcccctgcctggctccacctagcctctcacatggaccttgcccagagacctttcagggcaaatgcatggttggactggtcaaggcagtgggggcgagggaccctagaaggcagggatgccaaggagaaggccacacaccttcccacctcggttcctgagaaggaagaattgggagaaatgagacaggtacttccaggtggggtttcagagcctgactcccagggaaccctgttggtggagcttccagcagctccccatgggcagtccttgaatgaacgctgtgctcagagaacccatatcctgcagatggacctgcagccctggctcctcacccagctcccttggttaaattaatgctggggctggccatggtggctcacgtatgtaattccagcactttgggaggccaaggtgggcagattacgagctcaggagatcgagaccatcctggctaacatggtgaaactccatctctactaaaaaaaaataccaaaaattagctgggtgtgaatggcaggtgcctgtagtcccagctactcgcgagactgagacagaagaatcgcttgaacccgagaggtggaggttgcagtgagccgagatcacgccactgcactccagcctgggcgacagagccagactccatctcaaaaaaaaaaaaaaaaaaaaaaaaaaattaatgctgggaaaccagcctctgatgacgctccctgcccttctctcaataaagctctcagcatgatatttaaaaaaaaaaaaaaaaagcccttatacagagttctgcaatttacaaagctttcctgtcagtaattaatcccaacactaatagtggctaacttttatcaaatgtttgttatgtacctggtgctgtggtaagcactttaaatgtattatctcaactgaatcttcacagcagacctatggcctaggtattcaccccattccctcattatagagatgcagaaaacaaacccagagaggttaattaacttgcccaaagtcacacagccaacatgcggaagaagtgaggtttgcacacaggcttggctgatttcagaacccaggtttttacctattaagctttattggcatttaaaccacacggctatacccagttttaaccagggcccagaaaagctaagtggtttgcctgagtcacatagctggggctgtctgccaggtgatctgacatctcgggtccacctctcaaccccagtgggtgggtgatccccacggtgtggaaaggaggggctctctagaagcatctgtgcggaaagctgcctctcccacatccttccccacccacccagcttcctcacaacatgttgcactgaggctctgtttaaaccccagcgtggttgtcacagcagcctggacttccctgtttctctcccagcctccctgaaatgagaaggtgatggaagctgggtggtttccacctagatgggtggtttccatggaaacaccacaacatctttcagtccagaatgtggttgagggacacacctgggccacggggaccatggccacaggggctggttcagcttggagctgatgctcaggaggcctgtgctgggagtgcagggaggtcaccctggcaaccaggtagctactgagacaaaaaggacagggaggtagcaggagaagacattcatgagctccctccatccccccagggaccgctccattgtttctgcctgccctgcagaaacccactccttggatgtaaccacccttctatttctccatggagctgaggaggccccactccctcgatgccagaagcaggcaaaagacctgggctgccactcagtgccatccacatcacaggcacggcgagtggttcagagatgggcttgagacccatgctcacatacccggccctctttccatcaatgtggtaggatgaggacctgggctaccctcaggctccactggggacagcctgcccgagaagggagccaacagaggagggtagggctgaagggtgaatagggacagcagcagcctttgggatccagctgagccttctgctggctctggctactttcagttgagtcactgtcacatgccataaagagtcctgcccagggccagctgcataatttacacctagtgcaaagcaaaaatgcagggccccttgtttaaaaattattaagaatttcagctgggcgtggtggctcacacgtgtaatcccaacactttgggaggccgaaatgggcagatcacttgaggtcaggagttcgagttcagtctggccaacatggtgaaaccccatctctactaaaaacacaaaaattagctgggcctggtggtgtgtgcctgtagtcccagctacttgggaggctgaggcaggaggatcacctgagcccagaaagtggaggttgcagtgggccgagatcatcccactgcactccagcctgggcaacagagcaagactctatctcaaaaagaaaagaaaaaaaaaagaatttcaatacagcaacagcagattatcctgtgtgactgcataggttgaatgccgaggaagccagccctgtcttccctgtctccctcctccccatttctcagaagagaaaaatgaggctcagagttggagcaacttcccaagatcacatagatagaaagcagcagagacatgaccagaccttgatctgtgcagctccagggacccgggatcttagcctcggcaagctgcccagggcctccccatgaccctgctgtcctctgcatggctctactcacgtcccacccaaatgctgagctttgacttctcttttagtgtgaattttcacagagtcagagttaggagagacctttgcgtccagcaaatcatccaaatgtaagagtcatgcttttttaggctctgcttaaatgctccctgcgatggggaagtcagtacctcacacaatagcatgttgcggagttgagaggctctgatacaatttaagttctgctcaaatgacttctacccacttgtattagttcacatcctcctcctctctcagctacccaagtcccagctaggaccacaggaacaaatcaaatccctctctcgaaggacacatgtcatccagatacttgagactagactacatctccagggtaacttttcgggctcctgtgcccgccccttggggtgctgtgcagacctcttgccatgctctttaaggtgtgaaatagccccttataataaggtataaatgcatgaattggacccacatcttcctgtcctctccaggtttcccacatgagatgttggcaaatgctttgctagaatacagatacaccagctcagaggctgcatcccagtaccctgataggaaatgagggcgcttcctgcatcttttctgcaagtccagctgcaatccacgtaattagctaccccagaatgcagagccagtgaccagcgtgtgcttcagagattctagcccaagtgtctttccataatccctttccagaggggtagcctggactcctccattcccttctcaacaggggagagaaaggtcacctctccctgtcccaggctccagctgctcttcctccctctgccccatcgcaagagaaccccaagccagagaatcaggaagttctaattcagcaagcagacagttcacagagaaccacactgtcccctaggaacccgtctcgccacctgtgtctcacacatgagggtatgtgcgcaccaacaatttggggctttcagggtgagagcaaggaggacaagaaggaagtcacagttcccctgaccaacatctctggggagttgtctggccagccactgccactgtcacagcccccacctctggctcccagccaggccaagtgagccccttcccctccaatgtcttctgcttgagcgtgacagcactcagagcctcaggggcctccctggcacaggtatggcctgccaagtgcacccagctcagcacccacacaccacaggaaagggcaaactgcattcacttccttctcactcctcccacctccactctctagagagaacaagtcagaatccctgactgcctgcactgggcatggcccaagagctcgcctgtggatcagagagtctgggtaacttatccgaagccacacagcaatcagcggcagagcccacactaaaacacagggcccctgaatcccagggctgggctctgctcaccagaggctggataaacaagcagatgaggatcttagcaccgtgcccagatccccattcccgcagcccttgctctgctgacaacgagggcagcaggaacagctgccacctattgagcccttaccaggccttcatgaagtgaataatggcggcaataataataaacactggcaatgatgccagcaacatcagcctccggctgagtgccgcacgacgcccttcccgtttgttagtgctcttcatctctgaagtgctgcaaggcagcccctgggggctccggctcgagacaggatcagattttagaaagggcctggagggacagatcacacccactagtgggggctggggcagcagcctgcagtgagtctcatttctatttccctagggacacccgaatggggcaggcaaaggccatacatagccttgcttctgttcaggttcaattttgccaccaaattagttgcaaatgctacttttggtttttaaagtgtttctttggatttcagaattgcagagaagggacagtgggcctatattgttactagtttgacaaatgtggaaactgaggcacagggaggctgagtagcatgcccagaatgtcagagcagtggttccacagtcaagacccttggacaccattctgcattttcacagaagtgtcacagtctgtgttcacttcaacctgagtggtagagcagggagaggcagatttattctcaatttatagaagcagaacccaaggctccagaggtgacaggccatgccaaggtccccaacctccccatcgctgccctgagaagagtggctgcgggtgacagaggcaggaaggacagagggcagccctggagaccacagcagggtcactcccacccacctgcacgggagccctatctcctttcaaaaggcctttcttttccttaggttcaaacaagtcccacccccacgctgagccttgtctgccagaataaacacatcaagagtatgtttagtcttccactgagatttatgatgcgttgcgaaagaaaaaaatatattgttcattccaattcgggcgatacagtggcaccagaacttcttcagcaaagccagaaaatttccccctgccttccagaaaagatggtggtggactaaggtgaggcaggctgggactagggggtgtggactctgaaggggaagacaggggcagggggtgcaatgcacagagcttggctggggtcgagaaacccaaatctccaaacaagtcctgttctggggctgataggacacctctgaggctaagctcctcattatcagccaagcagagttacccagccggcgggagggcagcgtggtggatagggaggcatgggccttggactccaaggcatcaggatggaaatccccactctgatgcatccaagctgtgtgtgtcagtggctgaaagtcactttgctttcctgggcctcagtttcttcaaatggaaaatgtttgtaaatttgaacatgtattgcagctcacttttctagctcagctcctggcatgtggttggtgccaacctggtgggccatatttattactgtgagatggtgaatcacatagggtggactgcccaagatccctgcagaggcgaccagcttctgagtcatagaaaccggctcactggggcctggttctaatccaccctgattatatcactaactaggtcctaaagaagctcagtgccataggacagaaatgaagacctgaccccatgaccatttttctgggaaaggaatttccctcccttaactgctggcttcctgtctcacagccaaacaagctgcttttcatctacaaaatccactattttccacttttgccttgactgccaggaagctcagtgcccaagttagcccttagctaccaagagtatcttgtcttgtgaagttccattaagttctaagttctattaaatgttatttgttgatgttgatgttggtatagtgttttctcagtttccttccaagagggatctcaggcaacttgaccttcaagtggtgaagggcaggagcctatctggctgccggctctgccaccctccctggtggacaagaactggtggcactggaagcagggaccctaagggtctgctaggccacaggccatgtgcagcagggtctggggacgggtgaactcaggactcggagtcagggagcctaggctgtccttactccttcatctgcaggacggggattctcccacgaccttgagagggcctagtgaggatctgcgagaggaggagtgtaacgtggtcaacactgtacttggtatatgctgtgcatggactcaactggagggatggtgggtgttagagtcactgttatctatgttgttattgctcttcatctcagagcatctgcttctccatctgtcaacataaaaccctgcagagccattgtgaggacaagacgctgtatggaaagtttctagaagatcccacgtgcacacagtaggtgcttcttacgtgataactgtgactcacaattaactggctcacccaacagccattcttggctcctttctctcttgtgcctctgtctttagagtctgaaagttggatactcacattctcagcctcttttgcaaccaggggtggctttgtaacccagtctggggaagtctgttggaggacttttttttttttttttttttgagacagggtctcactctgttgccccaagctctgtttcatggctccctgtagcctcaacctcctggcctcaaggatcctcctgcctcagcctcctgagtagctgggaccacaggtgaacaccaccatggctagcatttttaaaaatttgtttgtagaaatggggtctcaccatgttgcccaggctagtctcagagcaatcctcccacctctgcctccctaagtattgggattacagtcatgagccactgcgccttttctgataaaagggatggccatgtctggcactgcccacttccccatcttcaggccacagcggcacagacatcgtgcctggtgctgtggcagccatcttggaaccacgaggtaagtgtcataatgcaggaaagccatcccagcgaggatgctcaacagccagaaccagggcctctgagcttccaaaccagacttccggtcaagtcaaccacagatgtccttcaactttaagccgctgtaagtctgattttctgtttctgaaagctgaacatctcccctcggacacaagactgatgtttttattaacggtctccttctaaacctcatttgtgggtgagtggcatggatttaatagttgctaaagtatcttaataataacaagaataacatttattgagtacttatggtgccatgcgctatgtgtttcactcagataatctcgaataatctttgcaaccactctgagagttcagttttcttattgtttccattttacagatggtggaacaggcacatagaggcaagcagcttgcccaaggccacacagctagaaagcaggggggtcaggctaagatccaggcccagcggggactgcccacacctgccgccttctcttctaacgctcccccatttgatcacaaggaatagtgtccaggaggccgtccctgacacctactggatctgtctgtgacaactgggggggttccttgtccatcccccacactcagtcaatcacccccatggttggtccagcccagtgaagagggagggagagaggggcttaccttgcccatgttgaagtagaagagggccccggccgtcacctgggcaatgaggatcaggagcaggaaagcaaagtactggggacacagagcaggcacaaagtcagctgagggtccccgaccaggtgcacccagcctgcgtgccccgagagatgctctccacccgatgttacggccagcgccgcggtcaggctgcactcggctggatgagaggaaatgggcaggcagctgcggagggatccgtactcaccagccccagcaggcagcggacctcgttgacggcgccgatgcagcccaggaagcccatgagcatagtgactgcccccacgccgatgaagacataggcccccatcctaagcgagctggaggaggtttctagggggaagaagaagtacaaaatcagtgggcacagcaggtataaacacctggcctaaccgtccaggtcttcttccggatcccctctttggagccagggtgttggggtcagctgcattcccctgctggcttctcactgcccaacagggaaccaggtcacccccatccccacttgtgtccctcccccagtaaaattgcaatccacaccctcatccagcctaagccccttcccggctttattttttacttcgtaaggcttctcaggattgaatagactacatttcactgattcttcttgctcattgtctgctctccccctccaccaaggacctgaggtgcatgagggcagaagcttcactttattcctggggaacccccagctcgaacagcgcctctcgcagtgaggtgctgtgcacagtgaatatctgcggaattgacagacaagaggctggctggttctccaggggccactgacattaagattccaagctgatttttaacccgccttccttcttgtccatataataacaaacaccagcctttcttgcccactcactgtgcctcatgggctttccacacgccgtctccaactctgacatcaccctgcctggcaggcactagcatggccatttcacagaagaaaaaaatgaggctcagaaaggcgaacaggcaagggcctgagctggaatttgaaaatatgcaaatctccagtgccacactctttccactgatgcacggggcacatgtattgctacaggtgtgctgcatgttcattcggccaagaaatgtttactgggtgcccacttcatgccaggcactgtgccagttgctggggatgcagaagagtgactaaca

SEQ ID NO: 421 - DNA, 2668 bp, Homo sapiens
cgctacacacaggtacccctgggatggcgtgagcactcccccagcgatggacccatctgtgacgctgtggcagtttctgctgcagctgctgagagagcaaggcaatggccacatcatctcctggacttcacgggatggtggtgaattcaagctggtggatgcagaggaggtggcccggctgtgggggctacgcaagaacaagaccaacatgaattacgacaagctcagccgggccttgcggtactactatgacaagaacatcatccgcaaggtgagcggccagaagttcgtctacaagtttgtgtcctaccctgaggtcgcagggtgctccactgaggactgcccgccccagccagaggtgtctgttacctccaccatgccaaatgtggcccctgctgctatacatgccgccccaggggacactgtctctggaaagccaggcacacccaagggtgcaggaatggcaggcccaggcggtttggcacgcagcagccggaacgagtacatgcgctcgggcctctattccaccttcaccatccagtctctgcagccgcagccaccccctcatcctcggcctgctgtggtgctccccagtgcagctcctgcaggggcagcagcgcccccctcggggagcaggagcaccagtccaagccccttggaggcctgtctggaggctgaagaggccggcttgcctctgcaggtcatcctgaccccgcccgaggccccaaacctgaaatcggaagagcttaatgtggagccgggtttgggccgggctttgcccccagaagtgaaagtagaagggcccaaggaagagttggaagttgcgggggagagagggtttgtgccagaaaccaccaaggccgagccagaagtccctccacaggagggcgtgccagcccggctgcccgcggttgttatggacaccgcagggcaggcgggcggccatgcggcttccagccctgagatctcccagccgcagaagggccggaagccccgggacctagagcttccactcagcccgagcctgctaggtgggccgggacccgaacggaccccaggatcgggaagtggctccggcctccaggctccggggccggcgctgaccccatccctgcttcctacgcatacattgaccccggtgctgctgacacccagctcgctgcctcctagcattcacttctggagcaccctgagtcccattgcgccccgtagcccggccaagctctccttccagtttccatccagtggcagcgcccaggtgcacatcccttctatcagcgtggatggcctctcgacccccgtggtgctctccccagggccccagaagccatgactactaccaccaccaccaccaccccttctggggtcactccatccatgctctctccagccagccatctcaaggagaaacatagttcaactgaaagactcatgctctgattgtggtggggtggggatccttgggaagaattactcccaagagtaactctcattatctcctccacagaaaacacacagcttccacaacttctctgttttctgtcagtcccccagtggccgcccttacacgtctcctacttcaatggtaggggcggtttatttatttattttttgaaggccactgggaggagcctgacctaaccttttagggtggttaggacatctcccccacctccccacttttttccccaagacaagacaatcgaggtctggcttgagaacgacctttctttctttatttctcagcctgcccttggggagatgagggagccctgtctgcgtttttggatgtgagtagaagagttagtttgttttgttttattattcctggccatactcaggggtccaggaagaatttgtaccatttaatgggttgggagtcttggccaaggaagaatcacacccttggaatagaaatttccacctccccaacctttctctcagacagcttatccttttcaaccaactttttggccagggaggaatgtcccttttgttcttccccctgagaagccattcctttgtctgccaacctccctggggtcctgcctgtttcctcccaatggagggtttttttggggggtggtccccgtctggggggcccctccagccagtactccaggtctccctgtctctcccccgctgccattttgatagtataatctatttttaaatggggcttttcaataggggagagggagtcatctcttcctatatttggtggggtgggtgggaaggaagggatttgggggggaatcttcctgccgcctcccccactccaagtgtttatttttgataccaaacatgaattttcagttccctccctcccagccccccaatttcctgcgggcgggtacaaaggaccctttcaatgtccctggagttgggagggaggaatgggggacataaagcctgtcctgtctctattctaggcaagagagagtgggttcaaaagactcctgggctcacctgttagcgctggcccagcccaggccttgggacctgggggttggtgatttgggggacagtgctacactcgtctccactgtttgttttacttccccaaaatggaccttttttttttctaaagagtcccagagaatggggaattgttcctgtaaatatatatttttcaaagtgaaaaaaaaaaaaaaaaaaaaaaaaaaaa

SEQ ID NO: 422 - DNA, 31737 bp, Homo sapiens
gaattccaggacagctctggagaggaagtgatctttgaatccaaccttgaaatcaccctaggagatgcaaagaaggtgacaccagttaagaataagatgtgtacccattttcaaatgttcttttttttttttttcagatggagtctcgctctgatgcctaggctggagtgcagtggggtgatctcggctaattgcaacctccgcctcccgggataaagcgattctcctgcctcagcctcccgagtagctgggattacaggcgcctgccaccatgcccagctaatttttgtgtttttagtagagatgggatttcaccatgttggccagactggtcttgaactcctgacctcaagaatccacctgccttggcctcccaaagtgctgagattacaggcatgaggcactgcacctggcccaaatcttctcagttctaaatggctgtgataaaaactacattgataatttttttttttttttttttttggagatggagtctcgctctggtgcccaggctgaagtgcaatggcgcaatcttggctcactgcaagctccgcctcctgggttcacgccattctcctgcctcagcctcccgagtagatggggctacaggcgcctgccaccacccccggctaattttttttgtatttttagtagagacggggtttcaccatgttagccaggatggtcttgatctcctgacctcgtgatccgcccacctcagcctcccaaagtgctgggattacaggcctctgcgcctggccttgcattgacaattaatttgtttatggaaagccagttatccaatgatggtgaacaaatgcaacttgactgtataatacttattttggttttggaccaaagtcaccattaaatatgccaagttcttgttcaaggaaacagctaatgtcgtggacttgcatctcatttgtagttggttctccctgaaaagtcagtggtgtgggagaaatgatacttagtcaaaatcatcagtgaaaatcattgcttggatcatcccaaaatataatgaacaaaagtgatatttatctgccacattgagaaacattcaccatatctcaataagctctcctcagccagttggtccttttgtggttgaaaaaagtgccatatctttggttgggcatccaataaaatatggtatttaggggctacctgtatggaaaatccatatccttaaaggttagctcaccaggaggatgttgagaaatggcacaaggggctgggcgcggtggctcatgcctgtaatcccagcattttggggaggctgaggtgggtggatcacttgaggtcacgagttcgagaccagcctggccaacatggtgaaagcccatgtctactaaaaatataaaaattagccaggtgtggtggtgggcgcctgtaatcccagctactagggaggctgggcaggagaactgctggaacgcaggaggcggaggttgcagtgagctgagattgcaccactgcattccagcctgggtgacaggcaagactctgtctccaaaaaaaaaaaaaaaaaaaggcacacaggaattgggttgggactcagtagatcagtagatttagatctcccagcttagtctcatctccatagtgtgggtggagtagtactcacactatttaaattatttttatttcactacctgaatcccctcagcaagtatagtttaattcacctgagtaatacgcttatgcgaggggatttctccatgggccttttgtttttgctcctgctggtgatctgattttaaatgtgaacgtgccattgctaagagtttttgttctatgtattattctgtgtggaaaatttcttaaatgggattattgaagtatacttcattatttatcttctggcaatttatcaacaacagcaaatatcattcattattgtttggaggacagaactatttttatattctttaattaaaaatggctttgacattttcaaattcagagggaagttgataatttagtgctgtatgataggacctttagttggtctgaatgtcacataattgtacaaattgctgttaaagtatattattacttattttctgagaggtagagggacttggttatcctgggattgcataattattggttcactagaactacagatgagtgaaaagaagggttagatactctctagttcacttttcttccagtgcagggaacattctatggggttccgaacagatataataagctcataataacagtggccattgattgaactctttctatcaaacaatgtgaaaaacattagtagaggtgatatcttagtctgcttttgctgctgtaacagaatacctgagactgagtaattttttttttttgagatggagtctcactcttctgcccaggctggagtgcagtggcgctatcttggctcactgcaccctccgcctcccgggttcacgccattctcctgtgtcagcctcccgagtagctgggactacaggctcctgccaccacgcccggctaattttttgtatttttagtagagacggggtttcaccgtgttagccaggatggtctcgacctcgtgatcctcccgcctcggcctcccaaagtgctgggattacaggtgtgagccaccgcacccagcctttttttttttttttttttgagatggagtctcgctctgttgtgcaggctggagtgcagtggcgccatcttggctcactgcaacctccacctcccgggttcaagcaattctcctgcctcagcctctccagtagctgggactacagatgcatcacgcccagctaatttttgtattttcagtagagacggggtttcaccatgttgtccaggatggtctcgatctcttgacctcatgatctacctgcctcagcctcccaaagtgctgggattacaggtgtgagctaccacgcctggccatttttttttttttttttttttgagacagagtctcactctgtcacccaggctggagtgcagtggcatgatcttggctcactgcaacctccgtctcccgggttcaagcggttcttctgcttcagccttttgagtacttgggattacaggcacctgccatcatgcctggctaatttttgtatttttgtacagacggggtttcaccatgttggccaggctggtcttgagctcctgacctcaggtgatccactcacctcatcctcccaaactgctgggattacaggtgtaagccactgtgcccagccccaagactgagtaaggggtgagcagaaattcactggttcacagttctggaggctgggaagtctcgtatcaaggtgccagcatctggccagggccttcttgctgtgctatcccatggcagaagtacagaagggcaaagaaagagggctgaacttgcccttttataatggcaccaaccccacccatgagggtggagtcctaatggcctaatcagctctctgagatcccatctgttaatactgttacaatggcaattaaatttcaacatgagttttggaggggacagacattcaaaccatggcaggtggcaagaagtatcaaactactagatccttgggattgtgctttgtactggggtgtattttttccaacaatcctaaaaatcatttgaatagagatagcaatatatatcttacccatttggaaatgcacagagattcaggagtgttcacatagaaacagaagatcattggcttttgtccattcccaacgccagtgatctgtttttcttgactctttttgatctgtgtttctgaatgtgttgatatactgcgctactggtgtgcaggatgattttaaatgttgcacagatgaacattaatagtcatctattttaatatgtattaggaaaaagcccataaaacaatgaagcccattaaaaccccatggtttcttggatagtattacatagggtgaagctaattttatttcagtaaaaaatatgcaggtcaatttaaataaaaaaatagataatagtataaatggcttgtggctacagtaaaaatgatgatggtacttgaatgtccaaattaatttaagtgatatatgtgttcatagataccatttcattttaacgtggttctgctggtcagaacagtcttacgatgggggtggtctccaggcttcaccttgtgcccactggctctgtttggttcctctgggctcacacacagggagctacgtatgtctctctcatttcctttggtatgttctctgggttaaatgtccccagctatctgatctgttccctgcgggccttggccattcctgtcctggcctttactggcagtctctattctaaaatgtgggcatcccacatgaggtccagcttctcctgagatccccggaggtgcagctgctgtgatggtgaccttgtttagcagatgctccctgcagtccaaactcccacccatcgtcctgccctttgatccatttcccatgaactgcttacctcagttttctcatctgtaagatggagagataactgtaagtgcttagcacagtgtttactagcacagactactgctattactgtcaagtcacttttcctttgctgccaataggtcattttctgtttatggcttcttcagtatgaactgatcaactgtaacttgaaaatttccagacttaggacttttggactcatagtgaaaggatcctttcccaattcccttgatcggtttttcctttaaaaaaaaaaaagatatttgacatcttttcactttcaagttcagtttctcttctcctttttttctgggtgatggtttattatttaaaaaatttctatgtatatgtgatttaaaagtaaacccacgtagctgaaaatgtctcataggtttttcttgcattttcagttgacccattcactttgcaaatctttagagtattatatttaagacagcttgcagctgttttcttatatatattttacatgacaaaattatatttaaaacatattaaactttaaaaaaccatagtttataatttataagccatgtagcatatttctatttttgagacaggatcttactctgtcacccaggctggagtgcagtggctcgatcatggctcactgcagccttgacctcctgggctcaagtaatcctcctgcctcagcctcccaagtagttgggactacaggcacatgccaccatgcccagctaatttttatattttttgtagagatggggtttcaccacgttgctcaggctgtaatttttaaaaactaaaaaaagaaaaaaaagtgtttacaggactttaaattgagaaacttaaatatctttacatattctgtgttcctaatttatttttgcagcagtaattatttcagctgtctttagtattgacatgttggaacctcggattaatttgtgcatggatatatttagagccttttacttgacaagaatcatgtatatcatgactgaatttgtaatttcccagcatgagacccaaattaatagacagtatttagattctaggcaacgatgcattatataaaccagcatcatttagggagtggcaaagactctctccccaccagttctgtgaacttgggcaaggtgtgtaatctttctgagccttaatctaattagaccctttctcctgtaacccagagggggtgttagtaaagttggtgtgaaaaaagtcaattattgtactgatgcaatttgggtgaaactgtgaagttcagtgttcacatgatggttgtggagacactgaaccttaatccttaggccagggattcaaagttttttttgactctcatgttgaacgttgtctaaagtgcagtgtgccctagtttttaggtaattctgagaattctaaggcccttgctggaataattaatgagaatatgagatttcagcaaattagggccaggagtcagtgctctcagcatggaagaatctcacctccaaaaattttatgtgggttttacacattaagcaagcataggtgaggtgcagtgaaggggaagtgatggctgtcagtcgtttggccaggttcctttgcatacaggggagctagtgggtgtataccagctgagacagctgaaggaggagaacatgaagaatagttggaaactattgaacctccaagatttttctgtctttgttaacaactagcagttacatgctagcattatttatttatttagttagttagttagttagttcttgagatggagtctcactctgtcacccacgctggagtgcagtggcatgatctcagctcactacaacctctgcctcctgggttcaggtgattttcctgcttcagcctcctgagtagctgggattacaggggcccgctaccacgcccagctaatttttgtattttgagcatgttggccaggctggtcttgaactcctgaccttgtgatccccctgcctcggcctcccaaagtgctgggattacaggtgtgagccactgtgcctggccttatttatttatttttgagacagggtctcactctatcacccaggctggagtgcagtggtgcagtcatagctcactgcagcttggaactcttgggctgaagtgattcttcttccttagcctccccagtagctaggactatagtgccaccatgcctggctaatttaaattttttttgtgtgtgtgtgtgtggtggagatgggttctcactgtgttgctcaggctggtcttgaactcttgggcttaagcgatcttcccatcttggcctcccagagtgctgcgattacaggcgtgggccaccacacctgtcctgtgctaggctcttaacgtccttcccagatgttatgtcccttcccttggtggctgctgctttctgccacattttaccttgcctttccgcaccttctaccatgtctccttttccagcctcattccctgagatgtagccggagttccagttcagccaacctgcccgttgttttctctcctggaactgggtgtttgagcctcctgcatggagtgttcttccttcccagctaaagtcctggtcatcccatttccatctgaaaggcccccttgttcatgaagcctctcatggtccttccccctaccccagccaggtatactttctctcctcttggaattaccctataggaagaacatggtggcttgacctgggttccagtctcacccatctgtttacctggggagtgatcttgagtgggtcaatttatgttctcagtgccttacaaaatggggcagaggatacctaacccccaggagctggtgtggctggggtaccttacacagggcctgactgtagtagcttctctccaagcattggtgtcttacctcttctgtttctctaatggtgttttgcacattcattgttgtattagagtttgtttttttgtcttaccttgttttaataaattataatcttatgggagatgacactgtcttttctttgtttcatatataaaaagtgttttgctgatatacgtagaatcaagttggtctggagttactctggataagggatgaaatcagggagctcttgtgttcaaaggggccttcttcccttttttggttctttctcctcattttttagcttccatttttacttcctttagtattgagaaagtaccaggctcacttcaaagagttgacttcaaagctcccaccagctcagacatacttgccactgaagcctgtaggaattggcatcaatggaagaccctgtggcggttgcatttaagattttttttgggacttctatttttataattcttttaaatggtaaagggggagggttacaaaatatctgcgcctttaagatatcaaacataagccagtgaagttccaaaaaaaaaaaaaaagatgtcttagagaaatgaaaaggattttacaattggtagaaaagaacaactcttttttctttttctttttctttttttgtttttgagatggagtttcgctcttgttgtacaggctggagtgcaatggcgccatctcagctcactgcaacctccacctccccagttcaagtgattctcctgcctcagcctcccgagtagctgggattacaggcacgggccactatgcccggctaattttgtattttagtagagacggggtttctccatgttggtcaggctggtcttgaactcccgacctcaggtgatccacctggcttggcctcccaaagtggtaggattataggcatgaaccactgtgcctggccaagtcttttttctttaaaaaaaaaaaggttacttttactgttttgtcctagttacaagatcttaggacagaaataaagccttaacttgtatgtaacattttccaagatggctaagtggagttgcaggttacatagcagaaaacagaggcttgggcctgttgagacctcacacccagttcttcttggagctgtgggtgtgggctgaaagagaagacagggagattaaagaccagtgatttccctccatggaccctttgatgctcttgtttgttgactttttgaggcttggagtgaccgactcttccaggaatgagaaatggaatccctcccagttttgatggtcgtcccaggacatatttcctgaaggcctactctgtgtctcagcaccattccaggactccccccgacagccttacggagcgtgctacagtcttcctgatccaatatcctgccacctgcccactcattcaccctcggccctaccccatgcctttgcacgaatctttccagcctgagcagcctgagatgggtctttttccctgctccgaaatcctgacctcataatggctcatgaatccctattcaaccttcaagacctggttcaagggttaaatcctttaaggagacttctcctgatttttccccagctggttgctttgttctccagcgatttgtaaccttgtgaacaaatattctactcattttattctactggaatgatctatttacacttatctccctgcaaattgtatcctgcccttcaatggctaagtgaatggcataaacagatgctataggaattgagactaagttggagctgggtgatcagggaaggttttaaggaagagatctgggacaaatagctaaagatggattcagtgttttttttttctttttctttttttttttttgaggcggagtcttgctctgtttcccaggctggagtgcaatggtgcgatcttggctcactgcaacctctgccgcccagattcaagcaattttcctgcctcagcctcccaggtagctgggatgacaggagcccaccaccacgcttggctaattttgtgtttttagtagagacaggttttcaccatgttggccaggctggtcttgaactcctgacctcaggtgatccacccaccatggcctcccaaagggctgagattacaggcatgagccaccgtgcccggcctgatggattcagtttatgtgcaaaatttaagaggatgggtttcggcagttcaggttgttaggagacaagggtggaaaggtgtcctggagccctacagagatgggcttcaagtgccagccaaggtgtttgaccatttttagaagaggaatgagatgattaaagtggaacttttaggaagagtaggagtgagcgggatggatttaaaaggcggagtgagaggcatcaggaaggctgggtaggagagcattgctacagtctaggagggaggtggcaggggtgtagaccagggatcacaaagcaatggcttgccatctgcttctgtatacccagagagctaagaatggtttgtaccttattaaatggttgaaaaaatcaaaagaatatatgctgtgatatgtggaaattctgtgaaattcaaatgtcagtgtctgtaaatagttttttttttttttttttttttttgtggaacacagccatacttttcatttatgcattgtttgtggttgctttcacacaatcatgccagccctgagtagttgctgcagagaccatatggcctgcaaagactaaaatatgtacttatgtactatctggctctttccagaaaaaatcagcagaccccaggtgtagaccaaccagggtgaatgagtgtatgactggaaatgcaaagacgggcaggatcaagggacagtttagagcaggggtgtccaatcttttggtttccctgggccacactggaagaagaattgtcttgggccccacataaaatacaccaacactaacaatagctgatgagctaaaaaaaaaaaaatcacaaaaaatctcaaaatgttttaagaaagtttatgaatttgtgttggtctgcattcaaagccatggtgggctgcatgcgggccatgggttggccaagcttggtttagaggcggatgcagtacgggagagttttcccttctcttctgatgtaactccatgtcttggtggcggtgttctagatgtaggcatctttaggcaggggagtgtgcgtggaagggtgaaagggttgtgccttcatgacgctcgtgtgtgtgtgtgtgtttgtgtgtgtgagtgatgctgagctagtcttagagtaaatgcagacactggatggtagcgagttcagtgcagtttttatggagggacagcttgctgcctgctgatgaagctggacaagactgggtagtgaagtcaaaggcccacacctaactctgaggctcttgggggcaactgtgttgtgcagagaaggtaggagggcagaggaagaggaggagcggcccctgggagaatgccttctacccagctgcagcttctcaagggtgtgtttgcgtctgacctaaggtgttggagctctttgtttctggctgtgttcaggctttcccccgcttgcctttaggggaagctgatgactgctttagcgtaaagagagggccaggaggtcaacttccctacagtcccgtgcctgcttctgggttggggctggggagagtgctgcccactgaactctctaaatgttaaaagatacaaagaggaagcacagagtgaaaagggagaccccagaggacagcagaacatcccgaagcatatcccccatcagagaagaggcatgattttcacctggcttgcaggtgcaggatgggcatctcagatgctgtgagtctgagggcagatgcccatcagtccaggacagttcctggggacaaaagcctcttctcacctttagagaaattaagtcttattggtagaaaatattttagagaggttctggtctaagcctctcattttgcagatgagaaaccacccaaggcccaagatggatggatttatcaaagccggttggtactggaacttggatttaatttcaggtcttttattattactatggaacaaatcttaactttttcaagtgcataccatgtgcccggctatgtgctggatgtagatgctttatctgcaggtttaatcttcactacaactatgggaagtagctattgtctctcttttgcaagtgtgaagagtgaggcttagaaaggccaacttgcctgtgatcgggtaactcaagagggaaattggatcagagtccatctgagactgactccagagccaatgttcttagccaataggggcacataaaactgttctgagtggcttcctagctcctgtttccagtgtccaatccattctcggtttctgttcattcatcagatgtgcactgagtacctgcaagaagtcagaagggtgttgggttggtgaggacagattgtataccatcttggctttggccgagccaaacagaatgccaaagatcggcaaagatagggaatgattgttcttggcctcagctccacgctcccctcctctgtaaaactgcccctgacaccccggcaggattgaattcctccacctttaagctcccagagtaccttagctctgtctttagcacttcacactgtgtcatgcctccccttgggccctaaggccaagagcatgtgccatttatttttgtattcctacttctatagcccagtgcatattgggggcactcaggaattgctgagcgaataaaagaatgaatgaatacagacccagattgtcaatgattctcaaaccttattttacaaaagaatcacttgaaaagctggttaaagatcaaaactcctgagccctactcctggtgattgactcctaggtttggggtgggaccccagaatctgaatttcccggaagcgcccaggtgtttctgatgcgggtggtctgcaaaccacacttgcagcaaccctggcacaggtgcccagccttctggaataaagacaggaactaagcattaaaaatagcacgccattcatttgcttgtgccgagccgccaagtgccccctcctgccggcgacaggtccggatgtgggccagttctcagcccagggaaaatgaacagtgtcttctccgtggtgcccagaacagtctgagtcagtggaatgtgctggccagtcaggcagaagggaacttccacttcttttttaaaaccttggtggaaactgtgctggcaaggcaaacagggaggagaggaagctccatgtggggcttgggcttggcggacgacttggggctggccggactttgggtggccgccgaggaccattgctaaatatgcccctttcgtcctgaaatagtcacttccccggctggcttttgtgttggtcggtcgccacaaatgtgtggctgttgttcaaggaggcctcctgggatataaaaagagagaatggggccaggctgcggccagggctgtgtaggaagacaggagagctgccttttctcctgtcccaccacggactcattgtaagattcagagggagtggcttctgggccctgggtttacttttccatctgtaaaatgggtggggggaaggggcagcatcataaagcttctttcttctcctgaaagggatgttttaaggcccatgtcaagattgaacacagggctctgttgttgggctgatgctactgatgaagtctcaggaagctcgaagtttgtagttaactctttcagggtagatgtggtgaatagtctcttggtattgtgttgatggtggcccactagaacagaaggtcccagagggcaagggcttggtctttcttcttcctctctgtatccccactgtttagaactgggctgggtgcagagtagtctccataaatgtttatggggccaatatctccaaatattggcacctactaagcgtcagtcccatctctcttttgtcttcttcacaggtttaacttgctgtttgagaagaggcgatatgaggagcagggcatttttggaggaagaaactttacctctgttttcaacgtttcatccagtttctcttctttttacttatttggagacatggtcttactttgttgtccaggctggaggctgaagtgcagtggcacaattatagctcactgcagcctcaaaacacctggcctcaagtgatcctcctgctttagcctcctgagtagctgggaccacaggcttacaccaccatacctggcaaattttttttttttttttttttggagaggcagagtcttgctccgttgtccaggctggagtgcagtggtgtagtcatggctcgctgcagcctctgtctcctgggcttaagccattctcctgcctcaccctttgagcctccttaattttttatttatttattttttttttgtagagacagggtctcattatgttgtccagcctgatattgctatttttttttttttaatggcgatgtagtaatcttgctttgttgcccaggctgttctggaactcctggcttcaggtgtgtgccactgtgcctggcccagttgctctttacatggtggaatatcagaggttaaagacttggtaaaaattcatgcggtgcaataaaccatgtattacataataggggtgacacttgttaacttctcccaggctcagtttcctcatgtgtaaaataggtgaatagtatctaccctccaggagttgtacaaggctcatgtatacatagtgtatgtgaatgtgctgtatgggtgcaaggggttgcagaagtgataatgtgtgtaaacagatggtgtggttggctcattggaggggtggaggccctaagtgagatgacctctgaggtttactcttcctagagtagttggaaagcaattcagcctcagtggtaagctctcagctcttctagggcaggtccctcttccaccaccctgtgtctgcaagcattttggtattaagttgtttttctaaggctgggtgcggtggctcacgcctgtaatcccagcacttttggaggccgaggtgggtggatcacctgagatcaggagttcgagaccagcctgaccaacatggtgaaaccatatctctactaaaaataaaaaattagctgagcgtggtggtgtgcgcctgtaatcccagccagctacttgggaggctgaggctggagaatcgcttgaacccgggaggcgaaggttgcagtgagctgacatcatgtcattgcactccagcctgggcaacaagagtgaaactctgtctcaaataaaaaatattatttttctaaaaagctcttattttattgtgaaacacttaaattagcaaatctcaggcttgctgaataaggcttcccaggcaaaccacatcccacatgtgcaaatgtctggtgacacagtgcttcatttttttccactagtacttactactacctgacattatagtgtaagtttacttgtctatttgtgtatggtctgcctctcctatgagaatgtgagctgcatgaggtcaggacattgttttgttcactcatgaattcccagcacccaggacagtgtctggcatgtagtgagtacccagtaaatatttgtggaatgaatgaatgaatacttaagtgggtgggaagttcttggaccttagtctagacccatggttctcaaagagtggtcctgggactcttggggattcctgagatccttttagggatctgtgaggtctgtgaggtcaaagtatttttataataatagtaaactatttgtcctttcactctcattccctcatgtatgcaaatctcagtgaactgatattttccaaataaccaatgcataaggccacaaagccatgcagggtaaaaagagctatgaacaaaagttttctagagaagaatttggaggaaagagagtttattctagtgaacagatcgcaaactgggagatgctgcgttggtgtaaaatgaaggtgcattccagagagcaaagagagaatctagttttttgttgttgttgttgttttgttttttaaattttgagatggagtcttgctctgtttcccaggctggagtgcagtggagtggcgtgatcttggcttattgcaacctctgcctccgggttcaagcgattctcctgcttcagcatcccgagtagctgggactacaggcacttgccaccacgcccacacaccctactaatttttgtatttttagcagagacggggttttaccatgctggccaggcttgtctcgaactcctgacctcaagtgatctacccgcctcagcctcccaaagtgctgggattacaggcatggcagaatctaggtttttatagcaaaatttctggcccatgtccccaatcaggtttgattatgcaaatgaagggggcgggtcaaacttgcttagttctgattggctgacacagctgagttctgattggtgatacagctgagccctgattggttgatacagctgagctctgattggctgaagcagacgagctctgactgcttggttcatgtgagctctgaaagtcccaagtcaaaagggtgtggggttttgtgaaacttggagtacgtagtgtgacctctagtcagcaaatggccacttggctgtattttaaatttaggtacactttgctgcttggggtccatcttgaggggattgcctttttcaggttcatgtttgttcacagagccattcaaagtgcagtggatacattataaattgtacaattatttgtaattaaaaaaagaacaacagcaaaaaacccaaagtgcagtggatgcaaagaccaatggattttcatgtaacagaatatgaaaagttcaccgacacagtttcacattccacgatgcagagaagtttttaataactgccatccacatgttgagttttggtgtaacagcaaagaaaaatatccacaactactgaaaaggctgagaaaatactccctttctcaactgcatgtttttgtgtgagtccagaatttctttacattattgtaacagagtgaacgcagaagcaaatatgagaatccagctgtttcttactaagcagacattaaagagatttgcaaatatctaaaataatgctatctctctcacttttttttttttttgtattggaaacatcattttccatacaatgtcatttatgttaacaggtgacagatttatttatttttattttttatttttttgaaacggagtttcactgtgtcacccagccacccaggctggagtgcaatggtacaatcttggctcactgcaacctccgcctcccgggttcaaaggattctcctgcctcagcctcctgagtagctgggattacaggcacccgccaccacacttggctaatttttgtatttttagtagagacggggtttcaccatgttggccaggctggtctcgaactcctgacctcaggtgatccacccgtctcagcctcccaaagtgctgggattgcgggctgggattgcgggcatgagccaccatgcccaacaacagatttattataagcaaaagctctttggggtcctcaataattttaagagcataaaggagaccaaaaagtttaagatgtgctggtcaagacagagccctgtggactatggaagggattgaagccattctgtggatcctataggcttcttttctaagcgaatgattagtgtttattcagtagccctatgtcaggtggtttctgtatgaatgagaggtttgcctttccagctgcggcggggctttgggcaagttgctgtctctgtgctccttcgtttgctcatgtgttaaaaactggcccaggggtctgggggtggggtggtaagaaaatgggttgagtctccttcatctctaacattttcatgtttaattcttggaacctccacttgttagctctgttcactcctctgaaagagattggtgagaattgaaacagtgaaagaagattttagagaaaaggtgacatgtaaagctgaacaagggttgcctgtgaggcaggcaaaaaggacatttattatatttaaaaaaaattttttttttgagacggagtctctgtcgcccaggctggagtgcagtggcatgatctcggctcattgcaacctctgcctcccggttcagcgattctcctgcctcagcttcccgagtagctgggattataggcacacaccaccatgcctggttgatttttgtagttttagtagagacggggtttcaccatgttgaccaggctggtctggaactcctggcctcaggtgatccactcgcttcggcctcccaaagtgttgggattacaggcgtgagccaccgtgcccagcccagaaaggacatttatatgtggggaccactgcatcttgcagatgggtaaactgaggtagcgacaggtgaaggctcagttacattcatcctgggtcccagactgtctccaacctgtagcctgaagctttgtttccttcctccctagcccaggatgacagcagtgaccttccatgggatcttttcctgggatttattgagccactgaggtcattggcctcaggccacctgcgtctctcgactgaccagttattcttcaaggaagacactgtgtgtgtgtgtgttttagttgctcttctataacttccgggtgctcttctcagagcagcagtgctttaaaaaatgtctgtgtgtgtatttccccactttgagccatgaaatatgttcagtctgttttttttctagtccaaagtatttccatatcattgtgcacctgaggaaatgcatactttgatagaaaatggacaaaaaagttgtattggtagaattaaatgaactaatgcatgtcaagcactgagcactttgactcaatagtaataataataataataacacaatgtatcattatgatagtgttatatctctttagcaatcttgatagttgacttgtataattcacagtacagaagcttattctaaaactaaaatgctttggttctcctgtgtgccaggaacagcagtaaactttatgtcctaagattagtatggttggaaatgcatgtggcagtggttcccaaacactggtgtgcagatggaacacagcccgtgaagttttcagcggtccttgttaaaaagagataaaggaaagagataaaggataaagtgctgagattctcgtgaagctaaatgaagctaaataaacatccttcaatgagaatatgtccttcctatagtttttggaggaaaatatttccttttgtgagacaaaagtgttagtaggtggtaagtactttttatttagcatagtacaaagttgtggccctctgtcaacccttcacattttggtgtgtgtaatgtttgaaactgcattggtctgtaaaatcccaaacccaggtagataaaaccaagaagtgacagggctggaagggatcttaggaattagttcataaagaacttcaggctcagagaagacatgtgagttgcctaaggtcacacagcaaatctgaagcaaatcagggctagaaacccatagacgatggtcatgagcactggttttgagtcatccatttgaacacacctgtgttcagattctacctctgttacttatgagctgatttcttacctgtgaaagtgggatacctacccaaggggttcacgggaggatttaataagatgatttggattaggaaaaactgacaaatttccccttccttcttctccctgccttcccctcacctgttaataaatagatccttgtgaaaggtcagtgagcagcatcagccagaagggctttgttttcagcaaggtccctgcatgtatgattacaatcctaagtaatatcagctgttgcttgcgttggtttctcagctctctcttggtgatctctctctttagctgttgaatgagttcaaagatctaggaagagctttgaaacccctctagcagcatttctgtctccagtcccagcacaggtctttggaggatgagataaaaagggttttgcccagggtcaaatgctgtgtacacgcttggtcactcttccctttcttgagatgacatgtccccttcttggagacccaagatgattgacaacaataacattcctttacaacgttttcttctcatctagagcactgggaggctgccttttaacagagatatcacagagtagcaagcatgcagacattctcatgacatcctggcagatatcaagaccaaagaacatcccatgttccctcttgaaggcttgtaataactgccataaattatcttgtgggaatggagtggccctggcctaagctgtgctgtaccggactctcctggtgacagttttagtggctgcatatgtttgcagaagaaggaagcgtggtaacttggcaaacagctccaaacgctcctggcttgctgccacaggattgtccttgagacttgggcacagtgatgtgtgaaaaatgcccacctttgctcttggtgtccagtgggccttctatgggccctctatagaggtcatcacctggggattcctgactctggccaggtcctgaggtctttccatgttactctccatgttacttgagtaacataagagcttcttatggctcttatgttctgcaggacggatgaactaggtacccaggacaggtctgtttgtgcacaaggctgtctccttctccccctccttggtttttctactgaggctttgttgtgcttggctcagggtgatgttagcaaatgcactctccaccctgctgtgccacattaaggaaacgcatgttgtattggcttctgccaagtcagctcacatgctttgttttagtgactctgtgaagagctcatcatctattatttattcaggtaacacacttctatctcctaatttcggtgctactcccatttttcatccccggttagcgtgctgtgcgccaggagggctgcctgttgtctttaagaaccactttgaacatttttgctttggttatttattcataccaacatgttgttgttaaatgacgtgaaataaaaccccattttaaaaagaaattgtaaaaggaagctatgtcctgtgtggaaatcatgacaagcccagaaacatgttacaaaaacattaaccaggagcggtggctcacgcctataatcccagaactttgggaggccaaggtgggcagatcacttgagaccaagagtttgagactagcccggggaacatggtgaagcccatctcaactaaaaatacgaaaactatccaggcataatggtgcaggcctgtgattccagctactcaggaggctgaggcaggaaaattgcttgaacccgggaggcagaggttacagtgagccgatattgtgccactgtactctagcctgggcaacggagcgagactccatctcaaaaaaaaaaaaaaaaacaaaaaaaacccacacacaacaaaaaataaatattgcctgtacctatcacctgaggagcccattgttaatggttgtgtgtctttttagtcttttaaaaaatgtgttaaaaaatgtagttgtcataatgtccgtatataaatttttaagtggagttgatagatttcatttgaagggctgctgtgtcataaatgtaaaatgcttagcaaggtgcttggcacctggagctgttcacagtaaatggaaggaatttttatggagggtgtaaggtagagtgggctcctgagccagactgccctgttccaggcctggctctgctatatctggctgctagagcctcgagccagccattgaagtgcagtgccttcatttccccacctgtaaaatgggggtaattatcatataccccaaagtgctgtcataaggatttaatgaaatatcccatgtaagatccttagagcactgctgccggatggtcatctcatagtaggtattggttgttattattcaggaaaatgttggaaaacacatttttaaacaaagctggtgttcagtcccctccctccccccaaccaaggaaactctctttaattcccagtctgctgtgattcagtgctggcctgggagcagccctcgagggcagacacagcacttgtcccctacccagcacagcacctgcctgtgcatccttagctgatgaatgaggctcacagccccaggcgccctgcatccttcccttctttctggtaccctcttttgtctcctccaaacacttgctactcaggcttcagggaggaagtaggaagtaggaggtggtttctccctcccagacccccagctcacactggtcttgaagggcgtggcatctgacagagcccggtggctggttttcacgtgtctcctgaagccacccctaaggagaaggcttcgatgtcatcttctggtcagagccgagcacagtggtcctcttcagagacagatccgtgcagcaggatggcacctctgttgtcctcccagactagcagtaggtacacgtgggcttcgcaggctgttttctgccctggaatgctgctgttttttagacccagcatacctcagtgtcagagaaggctggtttgtttgaaacggtcagaatgtcataaataccttatgat[450 bp omitted]cgaggaggaaggcggggcaatgttaggagcctctgtgccttggagctgcaggcgagttgtctggtcttgggtgattcccttcctatgtttgcatctcaattttccctcttgtaaaatggagctgagagcatcccttatatcacaggaatgtcattaggattacttaaggtgttggaatgtttcctggcctaggggaagagctcagtagaagcttgctattgccctaatatcattactatcccagatatgcattttcttgttatttccctgttaggcgttaagtgtgtgaaagtgtgtgtgtatatttaaaaggtcaaagtaaaattctttagaaccttagggcaggatagctcttgtttagttaggggtgtttggtgactgctggagaagtcacctacccagctgatcttacaattactgtctgcttaaaggcagctcttgacttggccttctctaggggaaaaacatgtagtttatgcaacttttcttttccctttctgctctggatttgaccttttgttccttcaggtgattgaaaaaattcgaaaagtcacctgtttcctcagaattgctttaagacaagactaagtgaaccaacaagaatgaagtcagctttttggaaatacctcccaagaggccttgctctttatgcaggactgttatttcaaaggatggtgtcccctccccaaccataagaacgatccaaacctgttttctggggcccagagtttgctgaggataggactgggctgaagctttcattgctggtctgtggggtagaggtaagcctcccctgtgaagctggtaggttacatgctttggcaacatgaattgttatttctggagtcccctgggtgctgtttagaaatgcaggtaggtggctgggtgcggtggctcatgcctgtaatcccagcattttgggaggccaaggcaggcagattacttgagctcaggagttcgagaccagcctgggcaatatagtgaaaccccaactctacaaaaatacaaaaattagccagggatggtggtgcatgcctgtaatcccagctactcagtaggctgaggcaaaagaattgcttgaacctgggaggcgggggttgcagtgagccgacatcgcgccactgcactccagcctgggccacagagcaagatttcatctcaaaaaaaaaaaaaaaaaaaaaaagaaaaagaaaaaaagaaatgcaggtaggtgcttctagctactgctgtgggatagcaaggtagttaccaaactgataagggtagcatcttacttactgctgaaaaattcagtgtcttttttctttttttttgagacagagtcttgctctgttgcccaggctggagtgcagtggcgagatcttggctcactgcaacttctgcctcttgggctcaagatattctcttgcttcagcctcccaaggagctgggattataggcactcgctaccacacctggctaatttttgtatttttagtagagacagggtttcaccatgttggctaggctggtctcaaactcctgacctcaggtgatccacccacctcagcctcccaaagtgctgggattacaggcgtgaactactgcgccgggcttgagtttgactttttgaaaatattccacctataagtgaagttgtgcagtgtttgtctttatgtgtttagcatatttcactcagcataatgtcctccaggctctgatgggcacttggcttgtttccatgtcttggctattgtgaatagtgccgcaatgaacatgggcaaattgccgtgttgagttaaggaagctcttttccagtctgagtttgcaaatagcttttcatatatgagcgttgaatattatcaaatgcttttctgcattcactgagatgactttatgtatttaaaaaaatctgatggcctatattttctatttctaaactactcgtgtattcctggtataaatcaactcagtgtgttactctcgtttttatacatagctggattcgttttcactaatattttgtttgagatttttgcctcagtgatcatgtatgtgattgctctgtaacttttcattcacattttgtccttgtctgtcctggtatcaaagttatattggcttcatagaatgagggaaatgtttatccttctaaaaatatttagtagagtggtctaagatgagagtgtaagtgagtaaactttctcaatcaaatattttgtgatatgtttcaggaatttcattacatgtttggttcaatttttaaagcatttctttttattatttaaaacttttagcattggtgaccatccatgtgctgcttttattgccagcttaacttgtttttatgacatcttcaggaagaaaacctctgctgtctatttaatggagatgaattgttaaacttttaccatttgcaactacacgtctctatgagtcagacttttattgatcgtgtacaactaaatgaaacccggaaatgaaggaaatgtaacaagcgattttatgtattttttgtttgctcaaattgcctttataaaatagattgatactctataataagcaaatgttgtgaatttggaattttcaaattgaggcttactaataatgttaactattttatccgagtttatttgggtttcttataaaatgtaatttctcaagaagattttgctgccctaaaaaaaaaaaaaagaaaaagaaaaagacaaaaagggaagccactggttgctaatggctcctgcggctctgacgatcctcgatgaagtgttctttgattaagtgtcaagatgagtggtgcagacctttgacagacacatgattgtggttggagaaagcccagcattaactgctgaccttgccatctgtgagcaggtgttgaatgagctcagttccctcccagcccttctttttccctggtgggtcattggctcctgagtaagatagatgcatgcaatagaagagctgttaatagcatttactctttcttaatccttattaatcccattcatatttcagtgtctgaaacttggcaggatgtcaagaagccacagtgcaagtagggaaattgaacagcaaggaccaagtacaatgttcccctgatatttaatttgctaaaacatgtaagaagaagaaagttcttacattgttaggtcccaaagagagtgccactaagcaaccttgccaaaaccaccttgctggagcttcttattatctttttttagcgaatggcaataaagtcattttgtcaagctaaccaagtaccataatgagatctttgtggcataaattaaccgagtggggaaataactttgacaggggttgatgtccgaaatgaagtgttgtttgtctgatgtcaagcctgtggggaatttgaaccttgcactctttcctgataagacattaacctctgcatgggcttgctggcccaaccttttgattaactggacctattttcttgtagatctaatacaaggatttggagaaccccagtaaaatgctggagggacttagactctgatctctattgggatgtgtcaaattggagatttggtgggcttttctgctgtgtttactgcgatgggtgtgtgtatttgaagtctgtatgtggcctttaaggatgtgtttggggcgcagaagttctgggtaacagagaggctctcaaacgttagattttggattagactttgggtcaacttcagggtagcaagaggatggatacccgagaacatgttttctccgacttcctggcccctgtcttctaagttctgggtagtgatgggtctttggaggggcagccctttctgccatgtgaatctttgcccagccctgagggggtgagggctggccaagggagccgggccatggtcggagagaaggctgaggctccttgagaagcatttggagtttgagtcagttgtgtcttttaaaaaaattacccattttggacttgcctgtggaagcaattagagagatcacaggaccgtttctgattcccaattctgtccagtgtctattcagaaaaatagaaaacagtcaactggaacaggggattatttgagcacacacagagtcctgttgtctcagcagcgtgccctcagacaatttgccttttagtgaagtttaagcccatgaaaggaaataaaaagtgttttattagatggcaaagaaagatggactggacttatgagactttgagaatttttgctttttctttgttaatgcaaactttggaagagagcaactctttctgtaatgcaatttatttgtacaatgtggtagttattgttaatagctaataatgatcttcaactgggtaaaataccattgtgtgtttgagagggagagagagagagaagggtaggaggagagggagaatatcttttgttcaaagccaaatgttgctacttctgaagacgagtgcaccttatgggtatagccagctataatgtttatcaaacatatactttttttttttttttttgagatggagtttttgctctgtcacccaggctggagtgcagtggcatgatctcagctcactgcaacctccacctcccaggttcaagtgatttctcctgcctcagcctccctcgtagctgggattgcaggtgcacgccaccacacccagctaatttttgtatttttagtagagacagggttttgccatgttggccaggctggtcttgaactcctgacctcaggtgatccacccacctcggcctctgaaagtgctgggattataggcatgagccaccatgccctgcctcaagcatctattttgtgcaagagcttgcagaagttctttcctgccacagccgtggttggccacattgctcccccatgaatatgtggaaactgacacttcaggagaattggtggctcacccatggcattcagctagtgggttatggggcagagactcaaactcagccctgactcccacagcattgttctttttctgtaaattgctgacttactcagttgatcacagttcattgccgtttacagaatttgtctgcacccattgtgccttttaagtgtcgattttctttcctgaaagcacacaaagcaaagcacggctctgcagtgtgacccaccgtgtgctgtgtggacagatgatgctggtcagcaggcaggaaaacgatctgccaggcgctgggggtggggcagaggattgttcttcctgaccttggtatgaaaaccgtatggagttcttagtgaggaaaatcactcttagcccaaattcctgcgaaggccgatgggattgtttttaagatttgttggattgctggatttgttgaagggagaactggaagaagctatcagaagtttacagggcatcggagggagacactccctttggccactttctccgccaaaactatcctggttttagcccaacagtttcccacgcccgcccccacccccacaaccttgtttgtttaaagaccattaaagaacgtcttcaatttattctggattgagttttcctcaaaccaaaccacccctcagttcaccccccagagctgttgaggcccttcctgggggcttgtggctgtggctgcctcagatcagagcagaccctgggctgcatcatccttccacattgtctctctaaagtacctgaagccagtagttctcaaactttggagagggttttgagtcacctcgagagctgataagaacagaggcccagattgaagttgaatagtgctgggcctttgtttttaccaagttccctggatggttctgctacctcctagcctgtgagaactactcctttgtgatttcttgccattgaaattttttctcaccttcttcttggcttgagtgctcttctgggttccttccggctgtccaaatcaaatttaattttcacacccagaccttgtccctgctctcatccttcagcccaccctcctgttccccattcagccagaccccctgccagtcagttcaagtgctaggcatggggtatcgagtctcaggccggtccacagacattccagcacctggtggtaagaggtgagtgctgcgtggacccactgaggaaggctctggctgtgctgggggaggggagtttatgctcgtcctcatagaaggataagcaggaattaagtgggcaaaggagggagtgaggaagctctcactttctaggtagtaggaccagcatgaaccaaggtaggggatgacaacatggctcattcagggaatttgaggtatgttgatacatggaaaaatgtacctgaaatgtgagtcctgcttttgtgactcaccctttcctttacataagcattgatttacatctgttgttttttaagatagtgtgtatgttgaaaagttcagaacaagatcaagtggagacataaaatggtaagatgtgaaaagttgttcttgccagattaaatggttccacctgaagaaaattttttttttttttgagatggagtctcactttgttgcatgggctggagtgtagtggcgtgatctcagctcactgcaacctccgcctcccgggttcaagcaattctcctgcctcagcctcccgagtagctgggactacaggtatacactgccaagcccggctaagtttttgtattttagtagagacggggtttcaccgtgttgccccaggctagtctcaaactcctgagctcaggcaatccccagcctcagccccccaaagtgctaggattacaggcatgagccaccgcacccggcctgaatttttttttgttttgtttatttatttcttggttttgctggcctttaagcaacccaagactagggggctttcactccgtccctagagagctcaaagggcctgacttaggggacacagtcagtgaaggggatgaatgaatgagtttcagatccaggtgttctggataagtcactttacctttctgggcctttttcctcaactccaaacagaggatgtcggtatagacaatccctaggatcttgtcccctttatgactgatcacacagttccactgcttgcccttgaggctttggtgtccgcgcatgcctattcagtctgacccacaagaggccaggccagctctgttccaggccctgaaaatcccattaaaactccactcactagcctgttccctgggggtgctgaatcagcatttaatggggaaggccacgagctaggctctggtgggtaggaagtgtgtgacttctcttacctcaacagtttctactgtaactagcgggataaggtaaatctatggaaatgcaaggcttatgccgaggctcacagagtgggccaggctgcataagtcctggacaccacagggcctgctttgagaaggcagctgtggtcccacagccttgaccaccaggcaccatcctctgttgccagtggacccacatttcaaatcattttatctctttttttttttttttttttttgagacggagtttcgctctgtcgcccaggctggagtgcagtggcgcgatctcgactcactgcaagctccgcctcccgggttcacgccattctcctgcctcagcctcctgtgtagctgggactacaggcacgcgccaccatgcccggctaatttttgtatttttagtagagacggggtttcaccgtgttagccaggatggtcccgatctcctgacctcgtgatccgcccgtctcggcctcccaaagtgctgggattacaggcgtgagccaccgcgcccggcctttatctcttaaataacctgtattcatttgttccttcccatgtcttatccaccaaaaatctccaattggaaattcagacaaggattgagaccctgtgttcttaaattgggttgattgaaatctagaaacaatgatagtaataacagagttatcttctctcgaacatctgcctcctgcctgatgttatttcgcttaattctctcaagggcttgaggagagtcctgccataatccttcctttcagaggggaagatcgaaatttagctcagatctcaagctagtaatcatcagaaccaggatatagaatcaggactagaccacatggtccctgctctgagctgctgcgggtccatccctgtggctctgtccagggtaaatggatgattcaggggaagggtcagcaaactatagcccatgggccaaatgcagccactgcttgtttttgggtggcccaagagccaagaatagtttccacatttttaaatgggtggagaaaacaaaatctacaaagaataatgtttcatgacacatgaaaattatgtaaaatatacatttaacgcttgtaagtaaagttctgttggaactcagctacagtcgttagtttacatatcatcgatggctggtttcgcagtacaagggcacagtttaaagcctgccaggcctaaaatgtttactgtctggcctattacagaagacgtttgctgacccctgatttagggcattcatgaggcttgatgagatgttgaaaatcagctgtctcctcccgtcactctcttctgattgtgggtaggctctggtgcaccagctctccagtgatctcctatctgatgctcagagttctttttccattgcatggatgtcaaataaaagtgtctgctttgtggcatttctggcttgagagtacctgcccaatgtgatttgccaaggtgccattttatcaaaagtcttaggatgactggatgggtttgccttgaatttgttttgcctttgctgatggttgtatttaggttatcattgaaagaggattgcagaacagcggcagtttcctgtgctgtctggattgaagttgaataatgccctaacttttaattgaaagggactgttgtaggcgggagactgtctaagagctgacctgtcaccaccacctgagatgtctgagcccacccttggactttcttggcacgtggggaagagggggcctgggtcctgggctcccacctaaactcagcagaccccactggcaggtgtgtgttgtgggggtgatggaggctttttggagggcattgagctccttgggtggaggtggggtggctgccttgggggctcagtgcagctctggccatgatggacagaaggagacaagaatgtagcttcttgttctgagaacttcagcccaagttcctcctttcatgcagcagaatccaagacactgacttgcccctctctgctgttgaggcttctgtgttgcagagataccttctggccctgctttatcctagtgaggcagctcacctctcccgtgtttcactgctcgaactctccttcccaaggctgtgctagtggtagtgatgacaataatagctactatttattgtgtgcccctcgtatgctaagtgcttcacgtagattatataatttaatacttgtcacaacagtcttatgaggtaaatactgtatatatatttaaaaagactatttttagagcagttttaggttcacagcaaaatgtagaggaagtttcacagagatatcccaagcaccccttgccattttctcttagttatgaaaatgatcaaatgggctgggtgtggtcccagcactttgggaggccaaggcgggtggatcaccggaggtcaggagtttgagaccagcctagccaacatggtgaaaccctgtctctact

SEQ ID NO: 423 - DNA, 31737 bp, Homo sapiens
gaattcattcaataaatatctgagtacagccgggcatggtggctcatgcctgtaatcccagcactttgggaggctgaagtgggtggatcacaaggtcaggagttcaagaccatcctggccaagatggtgaaaccccatctctactaaaaatacataaaaattagccgggcatggtggcagacacctgtaatccccgctacttgggaggctgaggcaggagaatggtgtgaacccgggaggcggagcttgtagtgagctgagattgcgccattgcactccagcctgggtgacagaacaagactccgtcttaaaaaaaaaaatatatctgagcaccagaaaaatggtactggatttgttgtggatcttttcactttatttcccaacactgacaaaaagcatattcaatcacagctccgcaatgttggaaatatacaaaggtgataagaattcttaaatggttccagtataagctgaaaatggaatataaaacacaatgctttaaggaccccttgaaactcatgaatatatagacaaagaccactaagaatgacataaaataggtaactttgctttgcaccaatcggaaaatgattagctcaactgaagaaaacttagtaggctgacaataggatgaaggactaaaatcacaaatagctgaaaagttctctgttgcttcatttcataaataatctttttatactttcaaactgaacacttaataaacagactaatcacctttgcctctaaaaaagaactacaactaaaaaactatggagattacactgacattcaacattcctaacctaagaacacaagacattattaactgtgtcttactcccacctgctgccaatttagagctaggtcaacctatcatactaaaaagcaatactaaagaaaacctccattacatgttcaagtttctgtctgctgtaataagaaaaactgtgaaaacaagagtgctctggagaaaaacaggtggctgtcagtagaactatgagttgcaaacaatggtttgggaatgaacaacctttacttgtcctttgagaatccttcacatcttaagagaatccaattaggaggaaacaagaaaacatgaacactaacaacacatagtattttttggaatgacttcattctaacctcatttaaactttattcacattatgtaagtgtttacctggaggtggaccaggaggaaggcctgtaggtggcccaggaggccgtaatggtggagcaggtggtggtccaagaggtggtggtcctggcatgggaggtgcttgtatctgagaaggaggaacagactgcggcggagcctgctgctgtgaagaagcagtggatgtgccatcagaatgggattcctctttatgctgcttttgtgattgcttttctgcttcagagtcatcagaatcatcttcatcatcgtcctctgaaaattcctctacttcccgtccctcctcagggatttcttgacctgaaagaaattttaaacccagtaaatggagttgattcattttcttacagtttggagaacagcaatgactgaatacacatggttaataaatgtgttctcaaaattaaaaaccaaatagtcttcttcaataaaatacttagatgtgaaagaaataacattctacttatctatgttaatgcagcatagtggaatgaactcaggctttaaaaccagacagaccaatatttaaatgccagccccaccatttacttgctgtgtaactttaggcagcctatataatggttccaaaccttatttttgtaaaacaaggacttattacttacttgaaggttgctgagatactaaatggaaaaacgtatgtaaagtaattagcgtgaggatacaccaaaaggtgattcactattttttccctgcctcacctgccatacgaagcatcatggcttgaagaggagtcagttccttcatgttcttctttttcttccttgattttccaggcatatctgcaaaccgtacactcagacctaaggggacaaaggagggagtggagtagattggcatcaacaaaattcagtaaatgtttactacgtagcactataaagtactagatatgattgctacccactacttggcagaggtgcaggatgagatagctatactaatgatacgaacacccagataaaaacaattttcaagaaaagataaattactaaagttggccaaagaagtgataagcccagaatatacaaaacttaaatggtagttgaagatctactccttaaaggctacaaataatattaggaggaaattcagccaaacattaagttacagaaatctgataaagagcataggaaaagatgaaatgttacccaactcatgaaactagcctaaccatgataccaaaattcatctactggccaacataaaatataagcaagttacacatgtttatagcagcacaatttgctattgcaaaaatatgaaactaatttaaatgtcatcaaccaaccagtggttaaagaaaatgtggtatatatccaccatggaatactactcagccataaaatggaacaaaataatggcctttacagcaacttggatgaagttggaggcaattaagtgaagtaattcaggaatgaaaaatcaaatattgtatgctctcacttataagtgggagctaagatatgaggatgcaaaagcctaagaatgatacaatggactttggggactcagtggggaagggtgggaggggagtgaaggaaaggagactacaaactgggtacagtatatacactacttgggtgagggatgcatcaaaatctcagaaatcaccattaaagaactcatccatgtaaccaaacacaacctgttctccaaaaactatcaaaattaaaatttacaaaaaggaaaaaaaatacaagcaagttgaatccaagtgttctaaaagccagcaatctaattcactaaagaacttaaaaaaaacaaaaaaagttacatcccaacagatacctaaaaaatatttatgattaaaaaaaacctattagcaagctaagaataaaaagaacttaactgacaaaggctatccattagacactggataggagtatttttagttggtaaacattttaggagaatagttccatgtgaacagaactttagttttgtttaccctgtatccttagtgcctagaaaaaatgccgtatatagtaaaaactcaataaatattagctgagtgagtatcaactcagagttgggacggccattttcagaacatgtgtgttgatgagaatatataagaaaaatctggctgggttggtggctcatgcctgtattcccagcactttgggaggccgaggggggcagatcacctgtggtcaggagttcgaaaccagcctggccaacacggtgaaaccctgtctctactaaaaatacaaaaattagctgggtgtggtggcgggtgcctgtaatcccagctacttgggagactgaggcaggagaatcgcttgaacctaggagatggaggttgcagtgagctgagattgtgccattgcactccaacctgggcgacaagagtgagattgtctcaaaaaaaaaaaaaggaaaaaaagaaaaaaaatctgtaggcagaataaaaggaaaagaaggcaagagaccacacagacccagaaaaaaatggagctgccatggctctaatggctttctactttccagtcctagttcctacctaatagtcctctataattatctttcattaccagctctatcatttttaaccagcttttttgttcttgcaaccatgattcttaagacacagcaggagaaaaatttgtcattatcaatattaatattacatagtattatatattctgttgtaggccacataaacaatcccaaaagaagctccaaaattgctgaggtttgacagaattggtgtgcattttccactgtcagtacccattatgatgcttaaaattttcttgacaaatgtcctatttgaattttttaataatcaaacacacacattatagatataatatgtttcatgattccactcatgagtgtacctgggttataattatgatcctggttcatgtaagataccataaaagggcttcaaaggtagatatttaaacagatttataaaatacaacatcaatgtttttcttaatatggctactctcctttctttcctgtaacatacccataatacgtttatgctgttgaatagttataccttttaccccaaagtgaactttattacatagacatttttattacatacagtttaatgcttttcctcataaacatccactgagtacttactgtgtcaaaaactttcaaaattttaatatataagatgaacacagctatgatcccgacttccaaagatttcagagtactctcacagattcattaataaattaggaccttcagcttgttttctctttattgatcaataccatgaatccttcatctgcacatacctgacttcttttcttcattgttgtctctctcaccattatcacggtgcacaaattcatccccgtcactttctccatctgatttgtcggtgtcactgtcatcagtactgtcatcatgcttatcttgatccatgtcctcaggatagccatcatcttcactggtgctagaaacatcatcatcatgacctcgctgggctgaaaagtgggaagggaacatggagaagtagtatgattggaccctccactacatggtacccagaaatacagaaaattatgctattcaactcagactgtaacaacttaattcttaccaaaaaaaaaaaaaaaaaattcttgtatatatagctactcatacagtctaacaaaattttcctctgccaataattttaaacacttctttttggtaatttaagatttttttaaaaagagttctaatttgaaaacccatttcctcctttagcaacaatcatgtttgtatacacatacacagtcagtgaatgtatacaatgacgctctagtctgatgacaataaagctaaaagggaaccagatatacaagtcttaaaggattagcagcaagagtgacatctccaggaaaagcctaatttaaaacacgataaacatttctatacttatgtatgatgcttttacttgagaagatcctatgatttatccaactgtatgtatattagttatgtacatgataccctctcatttactttctaagttctgagggtggtgaacaatatgttaaacagggccaacataaaaaatgatagttataaaagcaaaagaacagtcacttctcaccaagttcaggactatataacatgtcttcatctcgcctacgagggggaagatctagggcaaaacccactttacggccatacatctgcacgacttgaggaggaggtggaccagggggagggccaggaggttttctgccagggggcaaacgtggaacaccatgtccaagaagaggaaggatagaaactgcccgagttggaggtctgttaaaaaaaaaaacaaaaacaaaaaaacccccacagtaatcacttaacagtaatgagatatttattttctcttctaaacaattttcaagggatttcttattttacatttaatcaaatgtcacactgtttacatccatattgtcttttatttccctctgcattaattttggcactggacagtcaacttgtgcctttactaaatgctctctgattgtgacactgcttccttacccataggctgaggttttctttaggatagagggtggctgggcaccaggaagtggaatgtcctggatcaaaatgttggaaggagcatgtggcatatctggcaaaggaatactctccacttccacatgctgagcattctgaaacagagaaccattcagtagtatgataaaaaagtcatctactaactaaacactaaaaatgacaagtcagctgtttcgtaacttggacatgctttccaactaacataaatatcaccaaaaacccccagaaaaataaccttacgtcaatacttccacattgtcaaagaactgaaagaaatctttacttctaaaaacgtcagaacccagctgttttttttctcctcttatcaggtaattctttttggatgattcgaaacagctgttgtctagagaaagccaactgttacaagtatctagcaccagaactaccctatttaacatgtgatagaaaaatacatgtcaggctgggcgtggtagctcacacctgtaatccgagcattttgggaggctgacgcaggtcgatcacaagctcaggagtttgagaccagcctggccaatatggtgaaactccatctctaataaaactacaaaaattagccagttgtggtggcgtgtgcctgtagtcccagctactcaggaggctgagggaggagaattgcttgaacctgggaggcagaggttgcagtgagccaagatggtgccactgcactccagcttgggcaacagagtgagactcggtctcaaaaacaaaaaataaacaaaaaaaagaaaaataatatatgtcaactaacaaatagtatatatccagtggtggaggttgggctcattagcttgcctatgttgaatttctgttgtgtattagcttagtttgactaagcaaggtaacctgtgccttcatctgtaaaatgggagacatattacctcctttacagaaattatagcatttgattttttcccatctttattttgaggtaaaatttacgaaatttacaaattcagtaagttttgacaaatgcatatacctcatactccttcccaatccatctctaatatcatcccccaaggcaaccacggctacatttttttttcctgcacagattatctgtgactattctagaatttcataaaaatgaaatcataacaatgagataaacttagcatgtttttgagatttactcacaatttttctttttttattccatgctgttttgagtattagattattccttttattgctgaatagtattctattgtataaatatgctacagtttaattatccattatcctattagtgaacacttaggctgatccaagtttttgaattaatttcttctgtttaaataaagaggattagatttgcaggttcacacagtaggtatatgtttagttttagaagaaactgctataaggaagaggttcaacatgacattctcccattaactttttaaatctaagtataggctgagcatccctaatctgaatatctaaaatgctccaaaatcctaaactttttgactcccatatgatgccatggtggaaaaatccacacctgacctaatgtgatgggtcgtagttttgtttcatgcacaaaatttataaaattatcttcaggctatgtgtatatgaaacataaatttcatgcttagactagggttccatccccaaaatatatgcaaatatacacaaaaacaaaacaaaatataaaaaaaacccaacaaccctaaatccaaaacacttctggtcccaagcactttgcataagggatactcaatctgtataatattttagtttatctctcaaaaaaaaaaccttgattaccttgacagcatcaaaatattggctaagttgagccctcttctgttcatattctacttctagctttctcaattctttgtaaatatctggattctctttttcatagagtcgtagaatacgttcaaaggtttcacgcagctttttacgcttgtctttcagtactttctcatttaattgtggctgttgcactgggttaaactctaagagaaaaagtagattatggaattaaatataagaggccacttcaattaggtatcaataggttacatgataaaaacctccatatatgctaaaaaatttttaagagatctagacaccagacatactcttttcaattttattcgaagaactacaatatttattaaaatccccaccctttttagatggccactaattttacctttctcagaaatgccacctaattgactttcatcttcattgtaataaaaatcaattttcactgctctgtgctgaaaacctcgtgaagattctgtcagatttgtgtttacctactacgttagtcctgtcaaattttgagatcttaagcattttacttgaattctctgattttttgcttcctcatctaaaaaatggagacgttaatcactttgtaataaagctatgatgatacaatgggattacaaataaaatatccagtggtgtttgactcaccacttaactataatctttataacagatccgtattcctggcctagctactatacaatcctttctctccctaactaatcatgtgtcaatatggggcttaactgcaggtcctctatcccaagaataagacctccaggcctgcctggtcaatcatatccccccatcttccttttcagtgaatgactcagagatcaattagcacatgatccaaactgggaccagaacattccctgagattttaaatgtagatgtgagagagataagctctcagattttctttctgaatgtgttatgtagagagaaaacaaacctagagctgcctgtggccttgtctctcaatcatcactaattacacacatatattccaccttctatcccaaggagttcattagtagtaagctgaatgaggctaacagacatcagactagacagatggacagtactgatgatgagactggattttgaggctagtttctctcagggatttctcatcttttttttatgttaagacttcttaattaagacagccaatgcatgcttttttctgccttaactagtctgtattgagttttataaattgtaactagacccctgatgaatagtattctcttcacccctttcctttttcttaaaagaataacaaatttatcttcttccttaaatcctattaactattattaatcttggcaatttattcaaatccagagggcgtattcttacaccatactaatcctagtgtgattagtaaaagcgctgaatgcctgagttttaatctcagctttgccactacatagcagtgtgaccttgaggaaagctatgtaatctctccatgcctgagttttcttacctgtataatagggacagtgcacctaccctaaaaaattgtgacgattagaaaactggtggaaaaaaactggtgcgtaggtgtatagcaagacaactactcaagaaacctcagttattcctattatctccttttaaaacaacacataacatttggggtcatttaaagaaggattccctgattccccaaggaaagtaattatccctgctgatatttagaccagaggcaggaagtggaatcagttacaactgaactgggaaatatctgggatcctgaagcctgacccagaactcttagccaggctagctgcacagattctcccacattatttcagaaaccttgtaatagcctaatgccatgactgaattttttttttgtaccccatttaatgtatcattgaggagtttcattccatctcttttacttactactctgtttttgggcaaaacatggaacttgtaacgatcactttaaaatgctattttacaaaagtggcaaagggtagaagacaaagtggcagaaacttgacaggtgaaaagcacatggaagttaactagactattttattttcttgcatgtttgaaaatttctattaaaaaaacaaaatattctacatgttctaatattaaacagaatggatatttgtgggttaggataaaatttccagtggcaacatcaatgattttcaaacttagatgcaaaaaaagataacatgcagctatttcatgtgattccagttataacaaagcagcgatacttaaaatgcatatgaagagtgaataaaactattctataaaatgtgaaaaaggcagagaatcctggtatagtattttattatttggtttttaggtatttgatgatttttttctatatccttactaaatggataagtatctttttggatcttctgattggaaaaattggaaattgccttatattcacaggggcctaatacttagatttacatggtagttgccaacattaaataaaagacgacaaacaaaaaacccaaggttatttcataaatcagattaagtcttctcccaaaaagcaagctggccaaactgtgcttctgttatctcacaataacaattaactgaaagccaaataatcgcttccctcttattctggtatctggggtctccagtttgcaacagccctctagcactccattttgtctccctgaaactaacattaaatccaagcatcaaatgccatcatgctgttctgttttacttacgcctatgctgcttcactcgttacctgcctgcctctgtacgtgtcagactgttatagctgcctgtttgtaaattcttacccatttcatccaatttctccatgtctcggattatctgttttggatccttcatctttaaaactgcagctcgaaccatcatgcgctgttttttgttcttagaaaaataaaagggcagatgtcaagaagtcaggcactcaggagttttacttcaacttgctttaagaatctaaacagaataactccttggcttctgatcacttgtttcaaccaccagaaacagctatgtaattttttgccttaaaaatgtttacacttgtcaaaaagataaagaaatgctatttttaagatgtgctttcttagtaaagtatttctttgaactctgagatctttagcagttacttaaacacacatacactttaaatttcttttttttaaccccttatgttcttgaagaccttgggtgattgttcctgccccctgttgtaaaacctctgctagttgaagtccaaagcaaaggttgaagctaaattctaaaattatataaagaatatttaaaaattttgcaggagttaatgctaaacatgaaaacacaatcgaacattatttaaaatctgtgttgcttcaatgtattatactataatactataaagcacaatactataaggcaaatcctttctaattcttttgaagtactttgccacaaattcaacagctaagaggagaatgctaattgggaaaatggatatataaatctaatatatctataaatattataaacctacatatatatatttaagctaatgtaatatatgtaatagacagctaatcaggaaaatggataaagctatctagcatcatgtttatttccatcctcatcagtagactttaaaacagttatgttttaatgagtaaaaaaaagaattattttcaaaagtattttttaactcactgggaaaagtaatcaaacaatggcattataacctgtagtgagcttctctgcaaagttacttcagttcctaaataaagtttggcttagtatatcttacagtttttataaaaagcataaagtaccttttctagaaaatattagaaatgttattctgaaacccactaatcccaaatcacaagatgtaccaaacaatacttaaagttttataagatgcctctaaaatcataccttctttaattctctcttccgggcttcctttcctttaaaaggagagagggagatataataaaatctttgaatcttgaacattagcatttcctccaatttaatacaggtaattctttattgtggaaagttacagtatgcactgtaaaagagcagcatctttggattctctccactacatgccaagagcatccctctaattatgacaaccaaaaatgtcaagacatttttgtttaatgtttcataaaaaacaactatgaatctgaaggaaaaacataacataaaacgcgaaacaagggctcgcaaaactaatttgctcaaaatttccaatataaaaagaaagatttcagccaattctactttgcaagtcaatcaaatttgaaaaataaaatacgggtactaatttctttgcatatttaaagtcttaatgtgcccatacaaaccctgaatatataatttattcctcctatcactgctggtcttgtaattaagccacagagaaagaaattccctaatatttgcaatttttaacactctcctacttcatcattccacactaatggacacttacgggcttggtctgtggggttcataaattttccactcttggtggatgatgtagatctccgtcccatgttgacaatttgtatggtttacttgttcattaaaaaaagaaaaacctgtgaaggtgaagacaaagaaatagcttatatctcctaaatgtatttcttcctttttctagtccctaccaatctctgaaaaaaaattcctttaattagaaattctgtgagactgttctttccttagttttgactttaatgtccaagaaagatggcatcacctttcttgaccatgaaaatttagatctctatcattcttcagaaatgtgatgagtgtgaagaccactttgaatatcctcaagtcatcagtttagcttttttcttatggatcacagcactgactttgtcaactgataaaaacaactagaaaatgctttaacgatatggcacaaaccatgaacatcagaattcattagtccttcttctataacctccctttattaacatgtaattgtaaaagaagaataagaagggaatgggggtaatggatctaggctcaaaacacatacctcacctttgcctctctccatggtttttcttggcatgtatgctgtacattctcaatacttctaagacactaaaaactcattaatttaagcatatttaattcagattcagttctagttcagatataatgcttgactctcaagagttcaaaacacaactaaaaatgcaaatatttgaaattagtgctatactgagagctccccaaaacttaaatattaagacacatatttttcttactaagacctgactcccaatatatatttcttaaggtaattaaagggaatacttatttttgtttgaggaaaaaatattttgtaagctaaaacttttattaacacagtaccctattacatgacttcttcctcttattccaaaataatggggcttaattttttgaagcgcagtctttccagtaataaaggcggacaaatttgcttccttttgcaagtagacactttttaaaggtaagaaagggaagattttgtcagcccagtttattacagttaatgtctctttcaccaagtgtccaactgccccgaaagccagatgtttcagaaagccagatgtttcacagctgttctggtggcaattacttcaagacagcggtatcaaaggctctgatttttagcttcctcatctaaaaaatggggacatcaattactttataacaaagctctgatgatacaatgagattacaaataaaatatcctgtgatgtttgactcactacttaactaaaatctttataatggatccatattcctggcctagctaccatacaccctgtcaagtggtttccttctaagaaaaactggggatgggggggttaggggggtgggagagcagcagggagtaggaggtagggaaggaggaaaacaagcaaaatcagtacatatacaagctctcccatctttgattgcctgcgttttttgtgctttcctttctcaagtttcctcaggctcatgttctgaatctcctcccccacaaatgaaacacaacggatacgaattacagagaattttacggaagacactggagcttaagtctgcagattagttttttgtctacaagcggaggcgactggaaaatcaagccaaataagcgttggataactctaaacagccaaagaagcttcaatgggatagggtccaggttcaccaaaggaggcaacaccagcaactgacgaaaccatagcgacggctgaccgaccatgactcgaggtacaagacgtcaaacctaaggctactaatcaacgtgcgtaagaagcggccccaaccgacccgggcgatgccaaccgcgcaaccactggtcgccgcgccaccccaggcccaggaatagcccagtccgcaacagggagacctcaaccagggagaggaggagcggggcaaaggggctgggtgtcccccaagccgctgcgcgggacgtggaagggacgaaagaggtgaggaagagtagtaaatcaattcaatacactcacacttctgctgtgctcccaggactacgagaagcgggtagggggcgactcccggcctctttcacttcgtaaaggccttcaactgggtctctcggtcaacccctcagctaccgccatcttgaaacctcgcgcccctccgcactcctcacgtcatttcccattcctctgtcccgccttctcttagcgccgcttgaccctggaaccatagagaatacccaagaattccaggaccagagtctcttccggttccatacaatactcaattggttggttgtcggctaagagcccgcctcattgcgctcatctagtacaataggaattagaagaagatagctgctaactgagtggctgacggtcctgtctctcgagttggaggcatcttgacttagttgctgggagcctggtacgttgagccgtccgagaacggtacattctgcagataaagaagcgttctgcgttttctgtcttttggaattaccttagtttttgcatttttctgtttcttatgacccaagcaggtgcgatcctttaggggtgtctccgtgtgtaaacgaatacccagataacatttgccactgagtttaatccgctttgtaagcatcaggttatcccatgtgagcgcctagtacgtgtggaaatttaatagacaggcagaacagaacgtttgtagaccacctgaacaaataaattagcacccgtattagagtcgcagattgcttatatgggcggtgatttattatttgttagtagtgttttgaagaagaaatacggggatacatatgcagtcggttttaagttatatgagtggcaaggttgatatatattggctatattcccgactggtcttttcaccagccaaaagtcctctatgatgtcactctacgtacgggattcttcacttaactctagccttcgccctttccctaccttctatcccctctttccgtgagtcagcccccacttatttcccttaaaggtaagtttaaacatttaaaaaactatcttagaggatacgcttggttatttctaatcttaacctgactatcccatgtaggaaggctattcttaccaccagttataaatatttcaaaatattgatggagatacatactaatttttagcagaatctttaaactgcccttgaaggtataagatcggtcctatacctaaacttacctttgtgttaggaaattcttgatttgattttagactgaatttgagtgtcagaaagcaatgacgagatattgtaggttaaagctgataaaccaggtagtacataaaaaagaaaataatcttgaactgcgaaggtgagctaagttgtaatgttttgcaactagttttttttctttcctaacacattagtgatcatagttttgcaactcgttttgaaaaacaatgcaagaagagaaagagaaaacagtgtatgttggaaatattaaagtctttcatgtagctaaaattttatatgtagctactatttttaagatatgctgagcagtttttatttcaatacatttcttgtacttggatgggagaatcaactataacaaacacagtctggcatcaacagcatattaataattttgtcagtatagactaaaagagtcctcatgggaattattggttggcaaaggatttagaaaacaaacacatctgcagagattcagcggaaccattaataggcttccatagcctttggcgttttctaaaatcaggtaattagtgaaatggcccacctaatgcgtcatgtagcaaaggcagctgcctcctttttgctagtgttgaaaatgaaattatattcttttttctgaaagcttataataaattatgactttcttttaaatgacaaatgctttgagtagtgaccttctattctgcatcctaaatgcaatatgtgtagctgtgttttgctttcttgtcttctaaatgtttcagtgtttgaacattcacttgagcgatatttaattatcacagttggtcagggttgattgcagtgactgaaacaggaccttgatgtttttagttttgatttttaccattttcaaatccatccggtttacattgtgtaatcagtagacgtttacagatcagcttcctgtcctaattgaagcacattgttacaaaccatttttcagtctcttctagtttacagaaaaccagatttactctgatggtcaaaaatatggtagtatttctgtctcattcgaaggcctagagtttgtgtctaggcagaagttactgagtatgtccccttataactaaatgatgtttgaagctggtggtagaaatgaaagtctctgcattcaatgtgaaatttaagaattttactgaaattagaaaagagaaaagtaacccctatacttgctactctacgatagcatttaccccaatgttgatctggtagagcagggtgtgaaaacatccagggagaaaatttttttacctcacagggtctagcatcagctgatccaggcattgttgactcaaaactcatctagtcatctagtcttggcatctccagtttccctctccaaattgtttatcttatttaagtccatattggaagcctatagaaaatgaacctaatcaaagaagcaaacactgttactgaaaaggaagcagaaaaacacttcagtggcaaataaaacggctgttcatttcatttggtgtttcactgtattgatgacctcagtaatggcatgattatatttttctgaggctgatttgaactccaccagatgcttctcataacttttgatggctgcttgaagctgtgttttttccactgctcccaggatggcacggacaatcatatctatgccaaggccaagaacagcaactccaatactaccaaggagagaagcaccaatttgagctaacacagtgaccaacttgttaattatgccagttgtgacatttgagcccacaagtttaacagcgactgcactggctgcagatgtagcttctcccaggatgaccgaaataaccttttgcactattgcaattttgtctgtttccttttccttaatatcctgaagttttctatagagggttggctctagcttatcttttagtgcttcatcaaccttctgcaattccttttggattttcataatggcttggatgatgaggtcacagttttctttgatggtcccatctcttttcatctcaatggaggccagcctgcaccccaagtgcatatttagaacctcagtcagcttattggtgacatcgaagctgtcagataagcaatcaagaagctgctggtgaagacgatttacttcttcccgcctttttgggttctctgggtaaaggaagtcactttgggccatatttccaatatgatcgctgaaaaataaaatggtaaatttttactgaaagtcttaaaaaatgtctgctaactgtgtagaagggactaggaaatctttttcttcatgcatagcaaagaagcaagatgctgtctaaggataattcctcagaacactcaacaagtttttttaaaagagggagtatcgctgtgtcacccaggctggagtgcagtggtgcgatctcagctcactgcaacctctgcctcccaggctctagcaattctcctgcctcagcctcccgagtagctgggattacaggcatacactgccatgcccagctagatttttgtattttagtagagacagggtttcatcatgttgcccaggctggtctccaactcctgacctcaggtaatccacctgccttggcctcccaaagtgctaggattacaggcgtgagccactgtgcccgccctcagcaggttctttaaaacagttatttttatgaaatttggagtcagtgtatggaaagtgtaggcaacagaatacaaccctttgatggataaattaagttattagattttgtggtggtgagaaatattcatcgtttgtcaagcatctgtttattaataagcgtgattatttctaggtaatatttaataacttttatttgaaacagaccccaatttgaaatgcttagctcttgattactagtgctccttagtttcccgaacccctagtcaccacattgaccacacctaccagactgatttctctagcatttggagttaaactctagtcagggccagataaatattaacatctctaaatttacagggctgttttttgtatttcaatacttggttattttaacttaaaatattcaagtcactttatatatctctacaggcaagttatttgttttctaaacctaaaggatatccaaaggcaacatgtatatcatgctagaatctttaacaaattttttcttgtgataagagtatatattcaagactctttggattaaaatttcatgtggggagaaggtaggcactatacagggcacagtgttaatcagataatcatgtgattattctccatttgcaaagcttataaattaaattatttagaatagtctaaatagtatcgcacttgggcattatttagataaactagagtgaacgtcagaaaaaaaatgccattttacaaaagtattaaagaataaggggccgggcatggtggctcaggcctgtaatcccagcactttgggaggcccaggcaggtgaataacttgaggccaggagttcaagaccagcctggccaacacagcgaaaccccatctctactaaaaatacaaaaattagttgggtgtggtggtgcatgcctgtaatcccagctactctggagactgaggcaggagaatcacttgaacacggaggtggaggttgcagtgagccaagatggtgccactgcactccagcctgggcaacagagcgagactttgtctcaaaaaaaaaaaaagtactgagagtacatcatagaatgaataaaataaacttgacaagagacttcagtgtttgtccttttggcctacagtacctaacagtcatgctcttctgtgtttatttgggtgaaaaatctaaatttgagccagtaagagcacgatgctactcaatatgcatactttgagtagccttcctatgtggctggtactttttttttttaaattacactcttgagagaaaagagagaaaaaatggagttctttatccatatccatgtggaatctggcacagcctctttttgagtaaataatatcgtaattaatttggaccgtatgtcttctagcactacggttcttattctgcttaaggggaacctcagaagtatggaatgtaggaatgaagatttttttctttcaagaaagtaaacctgaaaataacctatcctccaaatcgtatggatataagttggcaacggaaaagagaaaatttttctgaaatggtttaggaacataaataaccatgtatgttgttagatttagaaaaatgcactggaacctcctggtaaaataaactaccatggtcagaaattaatttttatccttgattcaaatccagcacacatacacatatatacaggcatgcacacatgtaacagacacacatttccacaaaacaatacttagaaaatttcctaatccaattccctttaaagaaattgcttgttgatgatccagtaaatattctctaaacttacaatgggttggaaactgtaatttgctaagcacagatttggactttgaattttcttttttcttctagtaattttccattaaacgtttgtcttttttgactcccggttttcagatcttattatgaagtgaaaactctagtttctgactgacaggagaaaattagctatattccttttcagacagttaggtgagaggagttttcttatcctgaaaaagttcaaaatatctctagcagctatcatatgccattatatgaaggcatagtttccagaaaaggtgggtggttctgtctacctcaagataaacaaatggagaaatgaaccttcctcctggatgggaggcagaatgcttccaagtggtcggctccttttcaattaactcattgttttagcacaacttcacgaattaatcgtaaaatgtatctgaaagactgaacaggtgagccttattttttttcagaaaataaaatagaactcttctccccccagtattaaaacaccataaaaacaaaatagtaaacagtatggtacaggtacaagagtcagtgaattaatggaacaaattagtccccaaagcagacccttctatctgtttaataataataaattgtagaatctcaaatcaataataatcgaaattattactccataaatggtcttgagtcatgggctagactttggagttaaaaattaataacaaaattgttagtgtaatatatgtagaaaattaaataatagctagaagaaaatggataattttcaaatatcggtatggagtgggactttataagcctaaaaccaataaaaaaaaagcacatgcaaaaatttgactaacaaagatggccaatgtaaaaagaactgaaaacaagctggagagaatgcaaaaaaagtattgttattattttcaaaaagcagtgacaatctaatatataaatgagcaaaccaccctgaacagagtacaaaaaatagtatctaataaaatggtgggaaaagttcagtcttactagaaatcaaagtgtaagacattgtacgttttcaactactaaagtaatgtttttcctccttttaagtagtcttgctcttgcacttgcgcttagactctttttcgtgggatctagacatcagttcatgacttcgttccaataacgagtttggctaaagaaatgttatgatgtgctaagaattatgtttcccttataatgaaaaaggacttttattctgagtcagacttaccttcctagcttttttccttgggtggggagtggggagggttttcttgtgctaacatatcttcagcaggcctgccaccatacctgcttaggtatgtctgagctccagttctgaatacagctcaaggttatttctacaccccaaatgagataagaagcactggggaattaggaagaggagaggtggggattgaaagtgaaaccattgaattgtgttttggacaggtgaagtttgaagagcttagcgaagaaggcaattattgattcattaacaattcatctaataggttagtacttaccacgtgtaaggtcatatgccagcaccactctgcaaagcatacaaagatgaaaaagacatggtccttgcttttttggaatttctaatctagttaggaagttaagacagatttataactgtaatatcaagttgaaagtaatatgtcgtacaaaattaaaggtacacttggtatttgacttgtgcaaatttgttttaaacaacccacactttaatatataatatattggcactgtggccatgtggagacatttagtcatctagtaaggttaacaatttgtaacctttcaagtattcttagatatgtgcttgacagttgaggagaggctgggcaccacatggagaaccatagttggcagtgtgcagtattttcgctattgcccttaacaatttagttctgactcccaaagtgattactccactcagcaaaacaaaagccctgcaattatttggagtcacccttcttaaagatcgtagttgttactcaggcaagcttcaagtgatattttacaaacaacccataatattgtgcccgagaggagttctgagccatatactttctccatcttattccattttcattgatgacctgtcactttcaaagattgtagcaccaacagcaagtggtatatttaatccagctctaattaactacacctattgtatggtaagtttgaacttttacataatttgaattgtcacatgatggtgcttcctgttggtgaaaagttccacttggggaattaccatccacttttgtacagagtttgtgctattatttgaatattttcttgtagttatccatgaaatgggttctgtagtgccctggagcagcccattgggaattgctagacagcaggtggagctcttggtctctgggtctcccatttttcacctgggcctttgctggactggagcagctgtgctttctcttgctctacacatttgggctctgggtaggtaaaattttatttgatgagagagttctgttgctaaaacaaagtttggaaatttttgacttgttattttattaaaaaatgacaaaaaacatctgaaagtgctgatgtcattggtcagcacaccttaagaaatgaaaatggagacaaaggttagcttgagatggatgcttactgcacctaaccttgttaatttttttgaattgagaagtcaacatttaagattaaagggcatctaagatatggtagaaatatgctgataattgtgtctaaaagttaagttttatttaatgacatcatacagttgttttagtttttcagaaaaggaactaccttacaaaatgaaaatgtactgatcatcatatgttcaaatacaactcttcagggtactttcgtgaataacagtagtgcgttgactgtcaagtgctgttgaacttagaaattaatatcaaggtgattagagaaagcttcatggagaatgcaatatatgatttatactttgatagatggtacattatggagaaattaaaagtgaacggtttggtaaaacgatttttaaatatatacttattaccagtaacatatacacttttttaaatagaggaggaaaaacacccataaacctaccatttcacttttgatttttgttattctttttcaaaatttgtttatatgcataagtatcttcacaaagttatcataatagtataaataaaattcatcttttattcacttaacactttcccctatttatagctttaaaaatatttggccgggcgtggtggctcacgcctgtaatccgagcactttgggaggccgaggcgggcggatcacgaggtcaggagatcgaaaccatcctggctaacacggtgaaaccccgtctctactaaaaatacaaaaaattagccgggcgcggtggcgggcgcctgtagtcccagctacttgggaggctgaggcaggagaatggcatgagcctgggaggcagagcttgcagtgagccgagattgtgccactgcacgccggcctgggtgacagagggagactccgtctcaaaaaaaaaaaaaattttattggttacgtatactattccctgtctttaccctggttcaataaatctaaaattgtttcactatcactaatattctaatgagcattttgatacccacagattttttttcctccattatctggattatttcctcagcataagtacctagaagaattacataattagtggcataagtaatgggaattaaatttttattacttttgatatgtatcgtaaattgcattccaaaagcttttactgtgctaccccaaataaatttttatagcaggatactgggtatcctgctataaaatttttacaatttttattttagattcaggaggtacatacacaggtttgttccctgactatactgtgtgttgctgaggtttactgtgaatgatcctgtcacccagatactgagcatagtgctggtatatttcccagtcaaagatggtcctgtttaaatattgttgatttgggaagagtaaggttaaatttcaaaaagagaagttcttgcctatttggaaatacatactgaaaacatttaagatgaaatgaaatggtctcagagatttgttcacaaataatctggaaagaatagtggggtagggttatagaggaaaaaagattggccttgttttgataatttttaaagctgagttatgggtacatgggagtttattatattattgtctctacttctgtgtatgtttgaacttttcttataacaaataaaaaagaaagaaaaagaaaaacgtgaccctgtctaaacctctgatgtttagtcgttagtgctctctgaggttttacatttcttcttgctgtcacttttcttcactgtccaaacagggttttgccatcatgcacagtttccttatctgggagtgtggaaatagggtataggtaaaatcaggagcttttcagaagaaaataacagcttctaactagttctgagtctcctttaattcaaataaaaatctgtggcctttaattaaaacaaaaattgatcatgatgtgatgatatactttctgatataaattcatttaaaaaatgtttctgaccagaaagaagaatattaaagtcattcatcagcatttatcaagtgctcactggtgaagcctctactgtgtcccttgaggcatttgaaaacgacaatgttccttgccctcaagacgataacagcctgtttggagacacacagcaaatgctcagagatatttagatacaacataatttatgaaggagtataagtactatacattaaccagtattagattccacattcattctttcatagataggtactgagtgcctatattaatattaatgacatagaaggaaatgttactatccatgtaaacttcacacattcacacaggtatcatttcatccttaatccttcttagaattgatgtctttactgcttctcttccactctgacttaatcagtcctagaaattgttaattttcttccttctctgctgtcttcagagaaggcaccaggaaaggttccttccaaatcacaaggaacatgtcatgggatcctcttataacaaagctgtttttttactttattttatttatggttaggattcaagactgacgggctaattcaaattcctcctactactgagaaacagagtattatatcaatactaatagaaatatccacgttgcttaccttgctgtgtttctgagttccgtggtcctagcagttgtttaggagtattgttaaagtgctttttcatctggtttcatctggatatttctgatggaatgtgatgacttacagactttgctagtctctgctgggtccctctgcctgtctggtttataggctatttctacatggcttggccctcagaattccttcatttcctattaataaaaacttagtatacagtattaagttatataaactggaagactaatagtgtgtaaaacttatttttaaatttctgttctttaatggactttttattgttgagaagcgctatataactgagctaattcaatttagtagagaagatggctctttgattgcagctctcagattttggggttttatcttgtcaactattccagatactaagtttcttttagcttctgttgcatttgcacctctaactgttgctgattatttaaattctcaagatatataaatgcagttacttgcatccaatttttttttctcttctttccagctaggagttctcctctttgtcattctttctcttcctgtgtttgtaaattgtcttgacaatataaaaaccttaaagtccaacttcactcttttccctgaaagctcagatcagtcttccctgctgcttcttcccagcttcagtcttcagacccgttaattcctccacagcaaagacacctgagtggcagggaaatcactcagccccagtgtaacttagtgaaagacagcaggctttacactcagacagtcctggttttgtgtactccaagtaccacttactagtcatgtaatcctaagaaagtcacttagcctgagttttcccattggtgtaatatgagtattagttaataatttatggattaaatgggatagtgtttataaagtaattggcatagtggctgatatgtggcaaaatcttatgaaacggtagctattcatatattaacaacagtatctcctggtggaggggagaggagaatgggtgggtacaggatacagaatcaaaatgccagacaggcagacaggaaactttaaaatctaaagatgctgccctgtgattctaaagaagggctaagtggggtcacttttctacttttgtcccagtggatcatcttgcccttgatgtatccagggccccaccacgtacggatgtgtggccagtgtatctgaactaggtatggatgttaagtaggattttaatagatgtttggggaggatggtggtatagaggaaataatacagatagagggaacactgagagcaaaggagctgaaccaaaaattgtagaacattttcagggaacaaaaaccaacctgctggtgatacagggtgtaagtgggagcagttaagggaaggtaagtcatggaaaattgaaaatagtttgtagatagccttagatgtcatgctaggaaattgtatttcattctgtagataataatgaaccattaaaaaatccttttaattatggtgtaatatttggagatttggatttcaggaagggtacattatgtaaacttgattagtaggtatggacaataaagcataagttaccaaccccattgcctacagtatgtggacaaaatatgtctgtcttttaccctgtcttaaaacagttgcattttgtttccgaagaggctattgttgaagagtaccatttaacccacttgttcctaaggtgtttgtttctctcctatttctacccttcttaacatttattgcctactcatccactcctttctctcctaccacatagcagcctaagtggagttgccaaaattaaggataaacagtaacaatgcaaaataattatcagagaaaaactagaagcaatattgacttcatactgagccccctaatcaacttgaacttcttttttctgcaatcagtttctcaggttgaaaacttgaacttcttaaatctttcttgactactaaagccagtattaacgtcaagtcaatagtcagaactgaaccttaggaaggaggcacattttcttagtgtagatcttggagtcagggtggttttagggaatcaggaaggctgatttgacaagtttcactgctggattgacagtggtgggaaatgagagtgaaagcaataatatctccaaacttatctgcatgtagctctcacttgatcgtcttttatttagaatgctttattttcccttttatcctaaagctcatccccttcttttcctaaaatctctgctcaaaaaccatatattacatgaccctgaataaactgcccgattcaattacgattgtttcaacaatttgccagcacttatgaatgctgcacttaaaaaaaaatcaagcaaacctaaaaataatcacctttttgacccaatagcctcctttatctttcttcttcacagttagacttcccagtttggtagtgtacatgcattgcctctacttcattttctccattaattttccagtatttataatctagcttctgtacatattcctgcctcttgcaaaattgcttttctagcattgtcaatgacattgtaatgactaaacataagaaataatttacagtgtttatcatacttgcagcatttgaaattgctgatcaggtctttatattttctcttttttttttttttttgagacagagtctcactctgtcacccaggctggagtgcagtggtgccatcttggctcactgcatcctccgcctcccaggttcaagcaattctcctccctcagcctcccgagtagctgggattacaggcgtgtgccacacccagctaatttttgtattttttagtagagacggggttttgccatgttgggcaggctggtctccaactcctggccttaagtgatctgcctacctcagtctcccaaagtgttgggattacactaaaataaaatacttaaatataaatctaagaatatatgagccaccatgcccggccaatttatcgttttttctttaatggatatgcttttggtgtcatacatatcaaaggactaatcagctaaccaaaagttacaagattttcttctgtattttcttctgttttatggttttatatttttcatgtcccattttgagttaatttatgtatgtgtatggtatgacataaaatcaaggtttatgtttttgcatatgggtatcaggcttttccagcaccattcattgaaaaaccctaaactttctttttttgttgttgttctttctttgttttttgtttttatttatttcttccaaaacaaaagggaggatacatgtgcagaatgtgcaggtttgttacacaggtatacatgtgccatggtggtttgctgcacctattgacccatcctttaagttccctcccctcgccccccactcctcaactggccctggtgtgtgttgttcccttctctgtgttcatgtgttcttattgttcaactcccacttatgagtgagaacacgtggtgtttggttttctgttcctgtgttagtttgctgaggatgatggcttctggcttcatccatgtccctgcaaaggacatgatctcattcctttttatggctgcatggtattccatggtgtatatgtaacacattttctttatgcagtctatcattgatgggcatttgggttggttccatgtctttgctgttgtaaatagtgctgcaataaacatacatgtgcatgtgtcttcatagtagcatgatttataatcctttgggtatatacccaataatgggattgatgggtcaaatagtatttctggttctatatccttgaggaattgccatactatcttccacaatgattgaactaatttacattcccactaacagggtaaaagcattcctatttctccacacccttgcaagcatctgttgtttcctgactttttaataatctccattctgactggcatgagatggtatctcactgtggttttgatttgcatttctctgatgatctgtgttgttgagctttcttttttatacatttgttggtcgtgtaaagatcttcttttgagaactgtctgttcatatcctttgcccattttttgatagggttgtaaatttgtttaagttccttgtaaattctagatattagacctttatcatgtaggtagattgcaaaaaatttctttcattctgtaagttgcctgttcactctgatgataatttctgttgctgcgcagaagctctttagtttaattagattccatttgtcaattttggcttttgttgcaattgcttttggcatttttgtcatgaagtctttgcccatgcctatgtcctgaatggtattgcctaggttttcttctagggtgaaaacacctaaactttctatgttaaattgcctttgcatctttgttaaaaatcagttgaccggccaggcacagtggcttatgcctgtaatcccagcactttgggaggctgaggcaggcagatcatgaggtcaggagatggagaccatcctggccaacttggtgaaacctcttctctactaaaatacaaaaaatttagctggacatggtggtgtgtgcctgtactcccagctacttgggaggctgaggcaggggaatggcttgaatctggttgggggcggaggttgcagtgagctgagattgcgtcactgcacgccagcctggtgacagagcaagactctgtctcaaaacaacaacaacaaaaacaatcaattgaccacatttgtgggtctttttctagacttcctgttctgttaggttggtctacatatcaccaatactacactgtctcaattactgtggtatatcttaatattagattgtgtgagtcctctaactctgttcctttagaaaaatctttgtttattcttgttcctttacatttacatatatattctagaattcactgttctgtatctataaagaatcttggtggcatttttattgtgattgcattaattctgtggagtaatttgggaaaaattgacatcttaactacataagtcttccaatccatggacagagtttgagttgacatctttgctatatagagtctttcagttcatggacagagtttatctctccatttatttacattttctttgattttttttacttcagaattttatttttttaaaatcttagtgcacagattatgcacatatattcttagatttatatttaagtattttattgagagagtattataaatgatacttatacaaatgattggttccctattgttcattcctagtgaatagaaaacaatcgatatttgaatgctgaccttgcatctgctaaaattactaatagctctaagaacttttgtgtagattccttgggattttgtatgtagacatcatgttgtctagagaggtagttttatctcttccttctcaatttgaatattttctttttcttgtcccacatcactttctaggatttccagtatgatattaaatagaactagtgaacgtgaacatacctgactaattcccaatcctggggggtagcaactagtcttttattatgttagctgtggttctttgtaagagccctctatgattaaggaagttttcttatattcctagtttgctaagaatttttattattaatggatattgaatatttaaaaatgccttttctgcatctactgatatgatcatatggtttttcttgtttagtttgattttttaatgttgaactaaccttacatttttgggatacaccttaaattgttcttaaggaatattggtctagagttttcttatttttctgcaatggtagccttataaaatgagttgagaggtattctcccttctgttttctggaggatattgtatagaattgttattcttttttaaatgtttgtttgaattcacaagtgaaaccatctgtgccttgattttctcttctagaaggtgtttaactacaggcgcaatttctttaagaaatataggtttatttaagttttttgtttctacttggaagagtttccatagcttatgtcttttaagggaataggcctattatatttagactgttgaatttatgcactcagagttgtttatagtgttctctcgttatcctttttatatctgtagggtcatagtgacatctcattatttacattggtaatttgtgttctctctccttttttctctggtcaatctggcttaaagtttattggtttttctttaaacactttgtagttttgttggattttatctattttttctgttttcaatttcactgatttctactctttattattttttccttttgcttactttgaatgtttgctctttcttttctaacttcttaagatagaagttaaaattattcattttatatcttcctttctaatataaacacttaatctacagatttctctctaaacactgctttggtttcatcccacagattttgatatattttcattttcattcagttcaaaataatttctatatttttgtgacttcttttttgagccacagattatttaagggtgtgttgtttaatttacaatattttgtaatttttcatgtatcttctttgttgacttctattttaattctattaagagaagatttattgtcttttacatatatgaaaaaaactgctggaatttttaattggaattgtgttgtatttataaattagtttgaggagtactgacatcttagcaatattgagtgttttggcccattaacaatatatatctttctatttatttaggtcttccctaatttttctcagcagtattttacagttgtaagtgtagagatatttgatctctcgtcagatttatctataaatatttcatatttttaatgatattgtaaaggtcattgttttaattttaatttctgatttttattttgttgctagtatatagaaatacaattgattttgtac

SEQ ID NO: 424 - DNA, 31737 bp, Homo sapiens
gaattcctaaaactgaaaagaaagagaaaggaatgcaaacataaaaatgactaaagtgggcaaagtaggcaattcctttgacagaaaaggaatccctaaagactaatatgtataagaagtgatcaataattttagtaatcaaagaaaaggaatttgaaacagctaagaggcactctatgcctcttaggtgggcataaattagcagcataatgccatgaataggcacagatgcaaagacgtgggaaccccatgcactgctggtgagaatccaggtgggagcagccactccaggggcaacctggccccaccctatgacccagcaatttccctcctaggtgtacatcccccagaaaccgttatacatcctcctcaggggatatgtacaaagatgtttggtatagcactagggttagcatgggtcgtctaagaaatagatgccaagatgcagattaaaccaattaaacgtacaaagattttcttagacggaatacctgtgagagaaaatagggatggatgggagaactcataccacagtgaagtctgaccccaagtgaaggagagggaaggaaggttggtggaagcatcctaagaacctggtggaaggttctccaaatccaccaggaagtcctcaagccctaatcagccatgggaggagtcccctgtctcccaggaatgagcctgtcttagtcacctgctctgctcagtcactggctaggagcagcccacaggaagcaaggcctcaggtgaaacccagagatagatttcagagctcagagctaagacttaggtcaattacactcctgcaattggaggtctgtgaggcatagtctcatgggttccacatgttattcggagtacagggacaggaaggcaacgtgtatgccaatcacagggattgtggataggtaatgtgcaatagacaccaccagtgagcagttagaagcaaagaagtagatgtatacctaacagcacagatgggtctttaaaacaaagtatagagtgaaaaaggaagaaacagaatgggatatccaatataataatatttcctaaatgtgagatacatatacatgcatgcaaaatggttaacactcaatattcaagcctacacatgtaaaccaaaagattcccactatgccgattagaatggttgctaaggtggaatatggaggtaaacaggactaaataaaggaatatacaaaaaaaaaagacttgaactgagcctgagtaactcaatctcttgactctgagggtctaaataaacaaatcaacatagtgctcacctcatgcttcccccatagtcatgacacaggagcagcctctctggaattctttaatagcagcaactataaaagcagtcttctgttgtaaaaacagcagctctttgcacggtagatgtctacaatatccctgcccctttaaattcagctggccctatcagtgcctcactttgtgcagcgcagacccagcacagcagcagcacaaaacagctagcctaggaaccgcctcaagctgcctgcctgcctgctctctctgtcaacttctgccttccagctaacgtctgggttctccattcctgccccggtcccctagttctattgtttgttttcgtaatggctttattgaaatataattcacatgccatacaattcacacatttaaagtgtgcaattcaatagcttttcctataattgggtagccactatttcataatattttcatcaccttcaaaagaaacattgtactccttatccatcaacccctagtccctccatgcctcccccaccccccagttccaggcaatcactaatctactttttgtctctatagatttgcctattctggacatttcatagaaatggaatcatacaataagtggttctttgtgacaggcttctttcatgtagcctaatgtttttgagatttatctatcttgtaacatgtatcctttttagggttgaatattccattataacgatgtatctttttctcttttttaaagaaaaggtctcactgttacccaggctggagtgtagtgatgtaaccgtggctcactgtagcctcaacctctcaacctcccaggctcaagcaatcctcccacctcagcctctttagtagctgggactacaggtgtgtgccaccactcttagctaatttttaaattttttttgaagaaacgggtctcactgtattgccaaggctggtcacaaactcctggattcaagcaatcctccttcccaaagtgctgggatttacaggtgtgagctaccaggtccatactttcttcatccattctttagttgatggacatttgggttgttaccactttttggtgactatgaataatgctgctatgaaatttgtgtatatgtttttgtgtagacatatgttttcatttatcttgggtgtataacaaggagtggaattgccgggttgtatactaactctacttttaaccttttgagaaactatcagactgttttccaaagcagctggatcattttgcattcccaccagcagtgcatgagggttccaattatttcatatcttcacctactcttgttatcatctgtccttttgattaggatcctttggtttttgccattggctcccagctcctcctgaactcgctgaccttagctgacctgcacgcacttggcatcttccttggcttcagtgctcttcaggattccctgtgaaaggcatctttcactacactggcagaattagcccttggcttcctccactagaaaataggggttgcagataatggggttctcagattctgcccccaaaataaaagaatagagaaagaggaaagcttaatgtagctgacagctaccttagcccttgtggtagttaattttatatatcaacttgacagaaggggtgcacagttaggacgtaaaacattatttttgggtgtatctataaggagtttccagaagagattggcatttgggtctgtaggctgagtaaaggttcaccctttccaacgtgggcagccatcatccaacccactgagggccaaatggaacaaaaaggcagagaaagggtgaattatctctctcttctgcagctggaacatctatcttctactgcctgcaaacattgtagctcctggttctcaggtctttgtacttggactgagttgcatcactggcttttctgtatctccagctcccagacagcagatcatgggactttttgacctccctaattgcataagccaattcccataataaatctcatctttatctctattatctatctatctatctatctatctatctatctatctatctatcatctatcatctcctcttggttctatttttatggagaattctgattaatagagcccttttctttttcttctgctctagttgctagaatgacaagctgaggaatccaggagagtctgacctagggacagcagcaattctggaattccaacctgaaagtgacaagaatgacagcacaaccacagcaattaccaatttagaggtaggctctcatttccttaaatcttttcgttttctgcaaatgcaaaaataagagaaagaagggtcagcattgggcatggtaataatgaataaatctctgtttttactgacagtaatttacagttgataatgttaattgtttctgttatcaacgacatcatttttatggctgtttatttagtaacaactcttggcagttgtaccatttctgtgtttcaggctgaagggtcctagttcagggtgagacagatttgaagattatcatggctaaaggagaaatgctgtcatcgcagaggaaaaaaaaataccagaaaagttatggattgtgtttctttttaaccctccattttgaggctgggaggctgggatcatttaagtagaggtttattcctttggacaattgacttgagtttggatttctcaagtgtatttgaatttcaccccaggaaagcaggctcagtgaggatgttttcctaagtaatgattctatgcatgacagagcctttacttaacaatcatttaaacttgggaatagattaaatccattaactaggccagtgttttcccccttactgtggtcattaaccaaattgctagctttagttggaactcagataactatttaaagataccctagacctattgttttagcatttttatttcaacggacattactagaagactaattttcaatatttagttttacagacttcaagtataaactttcaaagcataaattctttttatttttatttttttatttttagacagggtctcactctgttgcccaggctggagtgcagtggcatgatcgcagttcactgcaacctctgcctcctgggttcaagtaattctcctgcctcagcctcccgagtagttgggattacaggtgtgtgccaccatgcctgttttttttttttttttggatttttagtagaaatagggtgttgctatgttgaccatgctggtctcgaatgcctaccctcaagtgatccacccgcctcggcctcccaaagtgctgggattacaggcatgagctaccgcatttggcctcaaaacataaattctttcttttttttttttttttttttagatggagtctttttctgtcgcccaggctggagtgcagtggcatgatcttggctcactgcaacctccacttcccaggcccaagcgattctccggcctcagcctcccaagtagctgggattacaggcacccactactacgcctggctaatttttgtatttttagtagagatggggtttcactatgttggccaggctggtctcaaactcctaacctcaagtgatccacccgacttggcctcccaaagtgttggaattacaggcatgagccatcacgcctggcctcaaaacaggaattctcttgttaagtgtaattcatatacatttaagtgcccctgttttaagggtactgattaatgagttatgcatttgtgtaactactatcataatcaagatataaaacatatatattacccttttcttctaccttttgctgtcaattcctacctattttctggccccatgaagccactaatatacttttgttactagattagttttgtcattttaagaatttaatataaatggaaccagacgtttttgaagttcatccatgttgttgcatgtatcagttttttttcctttttattactcaatattatctcattgcatccatataccacaaggataaagtttaccccaggaatgaaagcttggtttaatgttgaaaatcaataattataattcactatatgaccagaatacaggttaaaaagcatataatcatcacaatatatttagaagagttacttgacaaaatttagcacccattaatgatgaatactgtcagcaaactagtaatagaagggagtgttctcaatatgacaagggcttctacagaagatatgatacttaatagttgcattggttatcaattgctatgtaacaaattaccccaaaatttagcagcttaaacaataagtactcatcatctcacaatttctggggattaggaatttgagagccacttaactgggtgagtctcactgaagttctctcatgaggttgcaatcaaaatgtcagctagggccacagtcatctgaaggcatgagtggggctggaagatttacttccgagattgctcattcacatagctgttggaggaaggcctcagttccttaattgttatttgtaggaagcctcttgtccttaccatatagatcttttcataaggtttctcgagtgtcctcatggcttggcacacagcttcccccagaataagtgatccgaaagaaagaaaaagcaaggaggaagccacagtgccttttatcatctagtctttggagatcatataccatcatttccactagagtatattcgttagaagcaagccactaactgcagcccgcattcaagaagaggggaattaggctccactttttgagggaggaatattagagaaattatgcatgtatttcaaaactaccacaatgtgaaagatggaatgtgtttccccaggaagatcagaacaaagaaggctctatagattcagcacagtctaaatcaaaatacccacaaacattttatagaaactgatgagctgattcacctaaaattcatatggaaataatgaagatgttaaaaagccaaaataattttgaaaaagaacaaagttgaagggtttttgccacttgatctcaaggtttattgtaaatctacagtcatcaagacagtgtggaattgttttatggacagacatatagagtcataaaacaaaataaggattccccaaatatatgtatataatataaaattaaaaatatgataataaaatttatatattatttttgacaaaggcatcgagttaatggagaaagtttttcaacaaatggtgctggaacaactgtatgtttatatggaaaaaatggaacttgacccttaactaatactatatataaaaattattaataattcaaaatagatcatagacctaaatggtaaagttaaaactgtaacatatctttttaaatttaactttattttatttatgtatgtattgtagagatgggaatctcgctatgttacctaggctgatctcaaattcctgggttcaagcaatcctcctgcctcggcctctcaatgtgctaggactacaggtgtgagccaacatccccggccaaaactatagcatatcttaaaaaagattgtattagccagggttcttcagagaaacagaaccaataggagagatatagatacagatataagaagcaatttattatgagaatgggctcacatgattacagagactgagaagtcccatgatagaccatctgcaagctggagaaccagggaagcaggtggcttagtccctgtctaaaggctttagaacctggggaaccaatggtgtaactcttggtttcaggccaaaggcctgagaacctgggggctgcttgatacaagtcactaagtccaaaagtcagagaatctggagttctgatgtccaagagcagaagcagatggatatcttagcttcagaagagggagtgaattcattttttcctctgcctttttgttctatatttgccctcaaccaattgaataatgcctgcccatcctcaaattgggtgagggtgatcttccttgttcagtccactgattcaaatgacaatctcttccagaaacaccctcacagagttacccagaaataatgccttactagctatctgggcatcccttaatccagtcaacttgacacctaaaattaaccatcacaaagatgtaggataaaaatctttgaaaaattggattaagaaaaaattattatacataggctacaaaaagaaaccttaaaagaaaaaacactgatacattgaacttcatgaaagttaaaatatttttttctttaagtattactttaactgaataacagagcttagagtagagaaggctgtgtgtaatccaggtattaaggttctgattgatgaagggcactggccaggcagtcattaagtgatagtgatcaggaatcgaggcaggatgagagaatgctaggattcttagcagatgaagcatcctgacttagtatcaaaggagcaagacacagccccttcctcctgaccctgaggcttgtgcagtctgaaaggatggtgtcccagggcatcaaggagaagaggcagatttcagttaagccaggcggtggaggaaaatgcccagggaagaagtccaagatgtaaggggcatattgatcacagagtgtccttgtttgggcgactatagcaaaaagaccatggattgggtagctttaaaaacaaacatttatttcttatagttctagagtctaggaagtccaagatcaagccactggcagatccagtgtttggtgagggcccttttcctggttcatagatggccatcttctccctgtgtcctcaaatggtagaagggacaagggagttctctccggtctcttttcttttctttataatagagatgggctcttgctgtgttgaccaggctggtctcgaactcctggcctcaaacaatcctcctaccttggcctcccaaactgctgggatttcagtcatgagccaccatgcctggccaggggtctcttttctaagggcacaaatcccattcatgagggatctatccttaggatctagtcatctcctaacaactttgcctcctaatactatctatcacctaggggattaagtttccaaatacaaattttgggggaatacaaacattcaatctccagcacagagtctgacttctgaggctttggtgaaatgactgggaggaaagtgagccatcctgggaagaggaagccctgaggatagaggactggagagacaagttttaaaccatggctgccggaaagcaaggacataaggctaggaagacttagtcctctcagtctcctagaacagtggtcttcaaatatttttgcttgattattatcccaaaataattttgaaaaacccttttgcttttaaaaaattgaaatataacttatgtaaagtacaaaaatcttaagtgtaaggcttagtgaactttcatatatttatacatgcatgttaccaccaccaagattaaggtatagaacacttccagcagcttgagaggttccttcatgctcccttcttgttgatacctgctctctccttcccacaggtaaccactattctgatatgtatttccatctctcacatttttatgttaacatgtagggctgagtgtggtggttcgtgcctgtaatcccgacactttgggaggccgaggtgggcagatcactttaggtcaggagtttgaagccagcctggccaacatagcaaaaccctatctctactaaaaatacaaaaattagctgggcgtggtggcaggtgcctgtaaacccagctacttgggaggctaaggcgtgagaattgcttgaacccaggaggcagaggttgcagtgagccgagactgtgccactgcactacagcatgggcaacagagccagactctgtctcaaaaaaaaaaaagttaacatgtaaagatttctattataaatgtaaacggttgcaaaggatgtaatccctgtcatattttatatattataccttgccctgaagatttatccaatttggtttatagaaatgtctggcataaatctttttttttttttttctaagagacaagactccactctgtcacccaggctagaatacaatggcacaatcagaactcatggtgacctggaacctctaggctcaaaatgatcctcctgcctcagcctcatgagtagctgggactacaggcatgcaccaccacacctggcttgccctacaagatttttttttttttttttttttttttttgagatggagtcttgctctgttgccaggctggagtgcagcagtggcaccatctcagctcactgcaaccaccgcctcccgggttcaagtgattcccatgcctcagcctcccaagtagctggggttacgggcacacaccactacgcctggctaattttttgtattttagtagagatgaggtttcaccatgttaacaggccaagatggtctcgatctcctgacctcgtaatctgcccgcctcggcctcccaaagtgctgggattataggcgtgagccaccgcgactggctgccctgcaagatttttatacccagatagtatatttggggtttggaagagaggtcactgtgaaaaggaggtgggaaagtagaacttgcagagtgtggtaaaccaaatttaggagatggtgcaaatggaaatggaagacatgttaaccaatcagcttaaagtgaccagtgcccacttgcccctgggaagcctatgtgtacccctagggcaggttttctcaacctcggcactattgaccttttgggtcaaatatttctttgttgtgagggctggtctgtgcattgtaggatatttagcaacatctctgacctctatttaccagaagccagtagcattcctccactcaagttgtgacaacaaaaatgtcttcagacattgccaatgtcacctgggggagcaaaattgccctgggttgagcatcctagggtactccagtttgaggactgttgccctagaagatagcagcgtcacagagctcctctgttacctgggatgggggcccacaattgcagtgtaggacccagtttcccttcttttgttagtccacagaagtggcacctgaaccttatttcccagtatgctggcagcggcaggagtggaaaggcaggaagcacaggagtaagggctgagtggtcctccttgcaggggtgagcagagtgggggcagtggtcttcatctttcattctagcctttgaagctaaggagaaggttggaaccttctgtaaatatggtttggcaacttcgtcagagataaccctatgagaccccaagaaatactaaataagacttgtggagggctggggatcttttaacaacagagaagggcaagcattagaaaaattcatttttagtcttaagcccatttttaaaaccccattcaagtacggtctagggcagtgctgctcaaagtgtgtgtttgttaactgtttccagtctctgactagataaagacctactgctaaaataccaatcaacatactgcttccttcattgagactgtcttgctataaaaaaaaaaaaaaagtcagctgaaattagtttagtacttaatgactttagggcatagtgacatcatttatttacagtcttgctcaagctccttatcactgcagcagtacacacttgcagtagctaggacaataaattgagggtttttagagggtcttgaaatcagtactggaaatttcaatctttgttttaaaaaatctagcgacatagaaagatattagggtgcatgctgtttcaaaagaataagcattattttagaaaacttttggtgtaaatgtgcactatataaacattcatgtgtactgtgtcacaatgtaaaaatatatttctaactgtggatattggtcagaaaattttgaaaagtattggtctagggaaacagggaagtacaactgtgctgattttaggtgggatcatagccccctatgatcccagatctttttcagctatacagcagcagtagctactagcaataattaatctatattcctcagtttgcccaggtcccctgtgggtggcacctgtacacacctggttcttacatcttattacctaagggtgttctctggctgagacagtaggcttagccctcatgaagggcaggccgaaagtgcccaggagttaatgccaggagcagcttttactgtgaatgggaattggcagctaaaattccagctatctcaccccttttaaaaactttacaattcaaagttattacacaccattccctaagagggtcctctgtgggactgaacccttgttgttcacagtggtactctcttattaatacaccatttgttggctttcttccttctctgtttcagtttcccattcccttgcaatgggatcatcctccaaataaactacttcatccaaatctttgctttttgaagaaccagactgtattagtcaattttcacactactgtaaagagatacacaagactaggttatttataaagaaaagaggtttaattgactcacagttccacatggccaataaggcttcaggaaaccgacaatcaccgtggaaggggaagcaaggaacttcttcatatggtggcaggagagagagaagtgcaagcaggggaaatgccagatgcttataaaaccatcagatctcgtgagaactcactatcacaagaacagcacgggggaaattgtcctgtgatccaatcacctccctccctctctcgacacatggggattataattcaagatgagatttgggtggggacacagagtcaaaccatatcacagactaagccaactagatactggtcccttgttattataagagttgtctttcattgattacttattagatgccagctaatatgctaagcactttacataagtaatctcatataatctttacaacacagattaggaaaggaaactgaggttcagataaattaaatgactcatctaaggtcacatggccaataaatagggaaatcttccatttgaactcaggtctgttttatcctgttgcctgctgtgctgtaactgtgctattttttctcccattgtacacttccttggcccataaagttattgactatctaacaatttctccaagttagcctatcttgtttagttagcctatcttgttttttggaccaatcttcagcctatgctattcctttccatatccttcccctgaagtgctctgagtgacagaggtgccaactcctgtaggctgcatttcccaggctcctagatcaaccagcctcttcctgcgttcaggcaatgggagatgctggcaagaaactggagggaagaagagagaagtcagaatatttctccctctctctgtgtctccagttgcatctctagcatagctatatcttcagctctacctagtcaggcattcgatggtttgttgcaacttcccccagtggctctggcagctggtaacactgattcctactgttatctctccagcttaggggcggtagcaactttctgcttttacaaatctctggattgcttcacagtcctctgtttggcatctcagctcttccatgacctgtgtaaacaattcatggattaatttcctttgtttcaaattcttaggatggtttctgtttttctagttagaactgactgatacattgtctagtcctgtatttcacagagtgatgatgattcctctgatctgattatacataatgccggagtatgtcattgatgaaatgatagctcagaatcagccccaaaattgcttgccagtgtttgtaatgaataaggtgtttccgttttttaaaaattttattttccagctagcagttatgccaatgttctagcctgggttctctagaaagtagagcgtgaagcaaggactgagtgatgatgttgtatccaggagtatttgggaggtacaaagtcagggcagcaagcgcaagggaaaagggaacttaaacaggggaagatgggaaaccatgcaaggtgatgcttacccacaccgatcattgcttcaccacaaagccacaggtgacagctggtctctcagcaggtacatctgctcccctacactatctcaggacaggctgtgtggagacacagtgcctcagagtcatcgatccaaggaatttaaccacctgcacccctcggtctccatttccctcatcatcaaagtttgcctcggagagtgttaatgtcttcacatttctcttatagcatccaaccctttcagacagtcactcaggaagcctggtactatgcttggcaggctggcatactgtgtgagtacagaagaagcaggagaagccagactctaggacacagctgcctggacagagctgtcatccatggtggaggctgcgagtctgggaggcagtttggatggaaggaatctgagggggcacatgttatggctggaattctgtcccccaaaattcgtatgttgaagtccaaacccctggtacctcagaatgtcactttatttggaggcagggtgtttaaaaacgtcattaagttaaaatgaggttaaaattaagatgggtcctaatccaatctgactgatgtcctatcagaagaggaaattcaggcacgcaaagagacacaaaagatgcagacacagaggaaaagaccatgtgaagaggcagtaagagggcagctgcctgcaagccaaggagagaggcctcagaggaatccagccctgctgacaccttcatcttggacttctaccctccaaagctgtgagaaaatgaatttttgctgttcatgccacccagcatggtattttgttgtggtagtccaagaaaactagtacagcacaaaggttgtttctgagataaacagttcctgaaattccttctttctatgtagagaggttcttccgaaggattggcctgttcttatacaactttgacatcataattttggagagaaatccacccagtggtggggtgggtttatttgtatgaatatataaatattggggttctgttatttcaaaagctgtcacggaagttggtgagtgaggagagctgccttgcagcatagctgcacgatatattcccttacagatcccagcatagtgagcacaatatgtccctttctatcccagatggaaaggccaggtagagctgaggtggccaacatggatcttgtgtggaccaagcaaaacctgcagctaggggtgagtggagatgttagaagtgacccaatcatgtcccagagaaaatgctgagagtgaaagcctaagaagtgtatcctagtgagtcagacaagtaagggggcaccaaggggcactgctctgtgaagcaacattaagcagttaggtatcggagatggaggagggagaaggggatgagagcaagtcagaagaggtgagcagcagggctgactgcccactgaagctagaggactagtatccatggctaggcttcctggtacatgtatcacatgggcagacctaacccaacaaaaggccaaggagagaaattatttctaaatagattaataagtggatgactgctcctgtataacactctccctaaggatgcattaggaagcactgcctgtcctcatcatccataccttgggttatttctctccaaggaagtgactgctgttgaactagatcctgatgcattcattcaacaaacatttaccaagcactgtgctgggtcaagtgtatgcaaggagggactgagatagctctctctgcttaccatctttcaagaactgtataactctgattatttttcctaaatgtattgttgttacaataaagttgatctgatacacattttttaaaatccagtttcacagtttattccaaaagttaggatctttagtttagtacatttttcccccaaatgagattgctttttcttattcataatcaagatttcacttaaatgctatctttttgttttataatgattcctgttttactcattagcatcttgatattaagagaagagtccaggctttaaatttaagcagacttgggtccaaattcagctttatcatttttaaactgggtaaattttaatatctttgagccttagtttccttatctgtaaaatggagagaataacattcactttgcaagctagctgggagatgggaaataatatgcatttaataggtactcaataaatacttataacatggaattatattgtatttatgtttagttcgtgcaaattaaatgaaaaacaaagaaaatggcatactttttgctattcctgaaatatttcataataataatttttttaaaaaatgaaactttaaaaaatgccttaggaaagtgccacattgaaagtgaatatacagcctcccaaaaagtccgatgcagccaattttccttcagtattgggtgtttctttagttgaacaccagatgatgaagttggcttgtatttacagaccatgctgtaccaaaaaaaaaaaaatgtgtatctttaaacaccagagttacactcaacgcagcaagatgttcacactaggagaagccaaacaagagtacagaagattcaagtctgccatctcatgctaaacctggagcatatcctttgaatggaatggagaacagaggcactggcatcccgtaagttgtgcattctttcttccagataatttaaacagccgtaaaataagtctagttctgctaatagttgccttggaggtactaataatctttcattgagagaactccctgtttatccttgccctttataccccaactcaaacccagtaacctgcgtttgttgcccccagtttctttgtgctaaattcttaaaattgtcaagtgaagcttttcccaaattctctccagcttccattctaatacagtacaacacagaactatgaagtaattgtcagtctttacggttgtttggctcgagctttttggtcaatcttagagaagtaaatctttttttaccattagagttaatgagatataagaagaaatcctcagagaagctgtttgcaaatacactttgaaatcaaggaaatatagtaaggttttagaccatatttaatacatgttaaatcttcctgtcttacatatattttagtcaaaggttaagcatggtgtgaggaatggggtattttagttcttgttgagattttccaacatcagatatattatattgagtcataaaggtagtaaaaaggatagcacttttcatttaatgacttcctcttagcctttgtcaaataatacattgctcttgaagaagggtttggaaagaacaaagtgaagaacccggcattggtaagaaatactaatcactattgaaatctaagcaagtattttcaactagtcttcacactcatctgtaggccatagttttgaaatgttttcggactttcacatttccatgaacactggatagaagccacaaataaatatccttacatgatttctcttgtaatattaatatttttccacttcttataaaaaataaaatgataggccaactcctggactgatgatctttagcagcagcatattccttttactatcatccaatacatgtatataagaaaagtttgaacataaatacaattaatgaagtatttctgaatttttactcataattctttttattccaaagcaaatatcagatgttcagcaataccagattcaaaagcaaatactgcacacatgttgtcttagtctgcatgggcttccataaaaaaaaaaaatcacaaactgagtgacttaaacaacagacatttattttctcatagttctggaggcgagaagttcatgatcaaggtccggcagagtcagtttctggtgagggttcttttcctggcttgcagacagttgtcttctcaccgtgtcctcacacaggttttccttgatgcatgtacgcagagaaagagagagagagagggagaatgtgcacctgtgagagagcaagctttctagtgtcccttcttataaggacactaatcctattggaccaaggtcacccttttcctgctctgctctggcccctggcatcctggaaagcctgtctaaacttcagagttaatggcaggtgttgtttgcagtactcaagaagcagtgggcaaggtcagagaacatctgggaaaggcaagttcaaggtgctgcaggtttgcacagttaagcccccaaagtaccagctaccacttaggagggagctgagagccagaaaacaaagacaacccaggaagcaggggccaagaaagtggccaaagtttgaatataatgagagcagcaaagtccaagaaggtagcatggggatcttaattacttccttagaggccccatctccaaatatagccacactgggggttagggcttctacatatgaatttggggagaacataaatattcagtccgtaacacttgtttaccaaagaaataccatgccttttatcatattctttgcaatatacataacattacttgtagccacatgctacattgtattataacaagctaagtgatgaactgcgtattgattactctttttataacttataaaatgaaaaaattaattcggttagatctgacatcattttaatcttgaattgcatgcttttagtaatctatcttataatacgttttgtaatttatttctcagtggtttaaaatatatctcaaaataagaattaataggcttcttagaactgaaaaatgaaatcagacttttcaagtcagacttggcagtttggtttgacaaaagggacagcgtttgcttgttaggttatgtggcagacattttccacaagtgaaagatttagggctccagtccaaggttttgacaaaaatgtatttaaaacgtgtgataagatataaacattttatttaacaaaactgtatttgtaagagagtcttaaaattaacactgctcccattttccttcccttttctgagcctgttgagttaaataattgcctctacgtgaaacagtacaattaacagtcatttgataagtcttggcaaaggcttttttggtaatcttcatcaaaattgaagtgaattatagtgatgagctataatagctttgtaaaaaatcctctttcaagtcaggtagcttttaactcttagctttcaacaaagttgaaggaacacatttaaaacatcagcgtatagatcattaaaaataatgtttgatagaagatcataacatgatgtattactaaggagatattactaaggagatcaacaaattgagtgatggtttagtaacaaaacccttccatttctatctatttgtgtatgaatatggtttctcaaaccttacttctgtataaataaagactaagaataaaattgatgttaaactcccattctagcattaagtaatattcatccatgggtacatgaattaatttttaaagatcctattcatcttatcaatagattgatttccaatgcaatttttgttcaaaaagctttactcaaaacttgtaatacatgtatattgcttagatcaaatgtaaattagtagtaattgtactgataattcaatctggaggaaaattatttctctttactatcaatttacaaggatatttttgttgcagataaagattgtagggtatcaacaaaagacttctaagcataaagcatattacacttctttggagaaagtagaatgggaatatgagttcaaggagaaaaaggaatcatgtaaaatttcataccattcaagaaacatgtttatgtctttttaaaagaataatgaaatatcaaattgttatggtatttagattccattgcatacattttaagtgttatataatggctttatttttaaatgaccatcattacgaaaggtaagtacatcctttgcagccatttaaatttataatgacaaaattagaagtcaattggaatacataagaagggatagagttattacaaattcttttgaggatgttcctgcaatttaaagtcattgacttggaagttccaattgggtatgcttgcacagctatgtcagcctgatgcatccatctcattttaagaatggccctgactcacaggctggatatatgttcatgtatatggaccaagttcccttcttagaaacgaactgaaaccttttttgaactgtgagaactctctcttttttaaagttaccatgcagatcatctttcttttgttaagaatcttttgtttaggcaaaacttactatgatcagttagctttctcagagagtggccattcattccaacaaaaaatatttaattgaatatcacgcaggagaagtagataaatttagaaaaatgcaagtagtttggcctgatgctgggtctaactgttggcattacagtcttacaagctatgctgagaagtaacgctaagatgatgttctagatcaggttcgcaaactggaagctcccaggctaaatatgatttacttaacatgatttatttgatctacactgtgtttaaatttttaaaaaattagttgacaaaattttacgaccaggagatataacataaaaattcagttttccagctgttcttggaaaattgaaactggaaacattgggccagtaagctgaaactgacccaagtagtgcatagtggtttccatctttaagtaggacacgtctccaaatttgctattactcctgcgtttgtctacactagcctgcttcactcattcattatgcctgcctgactactatgggcatttgagattgagacattaactttggtttattagtttcccatgggttagatggaatctgcagaagcctaaatatctatgttgcattactgtggccccattaactgctttcagtaggtcattcatattgtgctctcaactttcatagacagttaccaaaagaatttgtatatttctcctacatttgtatgcttctccaatgagaagcaagcaactgattacattcaccttttttgctttggctgccagaaagctctacatttatggcttaactattgtattgtgttaatacctcataacctgcagatccttgtccttactttttctttggtgttaacctcctagtctagttagtttcgttggtcctcatttttttatatatgtttttttattttattgtatgaatttactggaagcctctaaaattacatgtttataaataaagctgtattgatttatttcctttctaaagatggttggaggatctatgacattttggttctccttaggaggttactatggtttttagttttccttgctcacatatccatttaccacctatggaaattacttagattgtaagcttttgggggacaaggacatttttatggtggtcccacagtgcccagcatctagcactttctatataatgccctgtattgcatagttacaggataataaaagtaaaaagtaatagtattttaatttaaactccttgggtcacaaggatttttaatctgtactgactcatgaaagtcttgtcaatcagaaagaatgagagctccatctacatatagactttacacactttatcataaaggaatgtgttatgtaagactgagtgataaactttctctagtgatcaggtgggggaaagtagctctgctaccttcaactgctaataaatttagcttcatttatctttgtctgaatccttatttaataccatggactcagacttcctacactacgttctataatagggagcatataacaatcaaaattacaaatgcctatacaaaatctttacaattgaatataaagaaagtctacagaaacattactagattcatgaaagtgaataaatctgtgtatatttcagttatggcaaaacatataatctaagactacatttatagtttggattagccaagtttgctgggaagaaaatgtttttcccagtgtaatgtatgaggcaggttgttggagacactttcttcacgtggctcagactgcggtccagctgctcagggcactgtttcatggttctgtccacagcgcgtgctcactgcgtcatttctaaagttattcacttgtacttaatttcaagccatttttttttactttgaaaactctgaacgcctcattgaggacagtacatacaatgtgtgccaaggtctggtttcaaagtttagctgtttttgagttatttgactggacaaaaggtcgaaagatatctttcacagcagggaaagtgtaattttccatgtctttatgatgtttagaaatagttggagtgatttttccctaaaatttccataagtaaataacttttacccgtggcataagcttgattttgagatgccttggcaaaaaatttgaaaataaccctctccctacctccagtctccagcctcatcctcagtatgcactccagcaataagggaattggagggaccccaggttaaaatcaagacctttcatgtttggattaaaagtatgacgtatggaaagttttagcttctaaaaacttgtctttatcatttaatattacgtatgttttagaaaaaagctgggagaagagctctggtgtctgagatcactctctccaaattcctgtagggtcctgctataattcctgatggtatttgcatctcacttattcatgtaccttacagccgactttcttttccacagatagaattggcctcccactttaggacaatgtgtcctccaaatttgctagggcaactccataccttactttaacttcttgcaggacctaactctccaatcagtcgttagtgtatatttttgtgtacttggctcaaagtctttcagtgtggatgtggaccttccggagagtaatctcctccaatgaagagcaaatggtcataaggaacatgtacgagcaggtattcctgttaagccttatgctccgtctttcacccatccacttgcacaggggactagtttccttttatgatcctacccaaacgtttggcctttttggagaagtgagggaagtgaggggtagaatttttgagactcagttcagggcctttgatatgctgttcctgtccttcaacagatgtatcaagtatctctgggtcatcccctaagacacgttggtgatgaacaattcctagaactggtctaatttttttttttttttttttggataacagcacagtttatattttttgggcatcttcttgaactgtacaagtatattcagcatcatttctctgccctgtcgatcttttgtcttttcttctgtgctgtcaataacctgtttggcaaatgtctacttccattgtccactccgtgagcagtgtacaccggtctccatctcccattcctgcaggtcccttcgtggaaacggcaaagtgcctgactgtagtcctctcattctggactgactctgccatccaccagcctcttctcccatttcccagggcttcctcccacatctgtctatttcatagatcgcctcctcctcttagggaagttgagtctgtcgagttcccctgcacatcgcctgccagtccaagtctcctgcccgcctcccgcacgccctcccgcgccgcggtgtctgtgggtcggttcccagacgcgcccgccggctcttgggcctccactggctggacgtgggtctgtcccgcgcccgcgcgtccgtccgtcccccacttgcctccaattcggcaggaactttacaccagccaggaggagaaggacggtgcgcgcgggtgcgggtctggccggctggggccggcgcgggggcggcgaggggcgccgggcggcgtcggcttgcgagcgggccgggggcgtcgcgggccgccctgccctataaggggccgtgccgcctccgccgccgggcgggtgccgggcggaccgcggcggtggcggcggcggctgcgattggctcaggcgccccatccggggactgggctcggcgctgctcgttcgccctaaaggtaccaatatggcggaggtgagcagggaaaccgggcaggagcagccgggctggagcgggcgcccggcggctccccgcgacccccgagccagcctgggggatccggggctctttccgctgccccatgaggggcggcgtggcgacgcgggggtcgcggggcggcgactggccgtggcggggctggccggggggcgggagcgggcgcgggagcggtctccctccgggactaggccgcggcggctccggccccggtcgggccgggcgaccgagccggacggaggtggcggccggctgcagtgagccctgccccagggacgaggcagtgccgtgtccccggtcgctgacgcgggccgccggcgcctccgcgcctcttccccgggcccgggtgggtggaaaccggcggagccccccctccgcggccggatcgcaaagaggggagcgggctgcgccactgccctgcgggagtcgtgcgctgtgcccccggcccaccgggcccgggctgcggcgcgaaggagccgcacgcttcactttgctgggggcgcggagaagagcgggatgcggggccaccgggcttctcagaagagcgggactccccaccccgcagcccgggaggtgcgggagcccctggggttaaagggcagaccgagaccctcgacgccctctccaggagagcggcttgatagctccagttttctctgggctggaggaaggaaggctgggcgagcgaagctgccccggccatgtcccccgggactggtgagctggggggagggggcggtgtggcaggagcccctgggctggagctcgctggggcggggggcgcgctgacggtccagggagggactgaacactctggaaggagccagcatccctggaactgagaggagctgcatctctggactcgagagagaggatggggggctcgcgctttggtttgggggcgagtgtccgattcgagctggcctacgctgcaggggaagagatcggcttcggagttggggctcccgggccccaggggcgaactaggtgctcagaacgcgagttcgttccagaaaagggtgttacgtttcgagttgtttggggcttcggagagccgggtgggatttggaggactccggagatgccagggatgggggactgatggtgccagccgactgctctgggttttgcttctctgcttggaaacttgctgagctccaagaagcgacttggagttgcctctcagactccgggcttcgtcccgggtctgtgagtttgtacacttgggactcggggaggaaggcgaggcagccaagagggggcccgaaaggggccgggagcgattcgagtgaagctacgtcttgcacttttggcagctgcggaggagcgctcgactccgcctcctctgcgccctgttgccggcgctgcctctttccctggctgtgcgatctaacctcacgttttcttctctctctcctaggcttcttttggaagttcgagcccaggtttgtcctattttcttacgtcttcggtggttcccagtgggtaatgtgggctcaaaggtctgttgctaaaggattcccaatagaaatgtatcctgcaggtttttcttcattgatttttaagagtttcagtgtgcatttagtaaagtttggggaagaaacagttatactgttctttgttttctcttgcatgttgaaaaagtaactgttacaaagttgctaagacaagcgttcttttaaggaatatggctttaattattacatatcttatttttcctccgagcctgaaacagttaatcccaaattaacttgacaccaactttagcaatttagattttaacttcggtttcttctagagattgagtaatttgtcagaactctgggactacttcactaactgtaacccctcatctcctcttacgttgtttctttttcataattaaatgtctatgagttgtgttaaaattggaagttgagaggtaaagctaccttaataaaaaagacagaacttccaagtttggcacagaaaaagggtgattttgacttctgagctgagacgatcttaggtcatctagtacagtgtttcttaactttcctgaggtcagaaacccctgtcaggatctaatgaaagcaagggatgtgtcccagaactctgcacatatgcataattacacacaatctggggtttgtagaatccctgtagcaggtccataaggacctttcctcatgtgctaatcatgtaaggtatctttgtttcagtttctcatttcctttctagcttacctctttgctgtcttccctctcctagtctacaggaaaagcacctctgaactagtccaactccattattttacagttgaggagacttttaaataactttcgttagtggtggagcacagatgagctcctaaatcttccattacaacttgtttccatagagtgaatagtcagtttccttacactattactttttgtatctgctccaccttcagagcctcacttgactgtcatttaaggtattataacaccaagtagaagaaatttgcagctattttaaaaatagctgtctatatctttaaaattctaaaaatttttgttaattttgagatgaacttttttgttataactgattttaggaaaatatatacatgatgtcaaacagctggattaatggaatttttccatttggtatcactgacttcttttaagaagttgcactctaaataagccaaaagacagtgtaacctgtttttaatcaattagcctctttttgttttttgtttgtttgtttgagacgttatgcaggctggagtgcaatggggcaatctcactgtaacctccgcctttgaggttcaagctgttctcctgcctcagcctcccaggtggctggtactacagggatgcgccaccacacctggctgatttttttgtatttttagtagagatggggtttcaccatgctggctaggctgatcttgaactcctgacctcaagtgatccgcctgcctcggcctcccaaagtgctgggattaattagccagttttttaaaaagagaattttagagttggaagggacttttgaggtcctttcagtcatccccatgtattttgcaaatggaagacaggagctagacctagaaagtttaaatgacttcctttaggtcccaaaaagccaaggacaaagctgggagtagaccctcaggtccttcgatttttgacccttactgaataccttccatgttaaaggggaggcctgttgtgccaagtgatagaagagtaacagaagagcccagaggagctctgctaccaaagaggtgaaagagtcagcatctatttcatttctgcctctttggcataccatggaacttgccaagaattcctcaaaaaaagaaaatttgtaatggtggatgtgagctaattaataaatattcttatttcttttttgttgtttttttgttttttgagatggagtcttgctccattgctcaggctggagtgcagtggtgtgatcttggctcactacagcctcgacctcccaggttcaagcgattctcctgcctcagcctcccacgtagctggtggtattacaggtgcccaccaccatgcccggctaatttttttgtattgttagtagagacagggtttcgctatgttgaccaggctggtctggaactcctgacctcaggtgatccccccacttcggcctcccaaagtgctgggattacaggcatgagccaccaccccggcctatatttctttttaaattaaaccacatgtaaatcaacaagtttttaaatgagcagatatttttcaacattaaggaagataacataatgtaaacctgccaaaaaataaagtcctgtagaaattgtatttttagaactaattagagttctctgaacccagaatcaaaaataatgaattatgtgtgtggtttttccatagtgaaaaatctttggcccagttcagtgttttggtaatgatctcacactgtcctgaaatgtttgaaattttaaaatattcagtagcttgactaagaacagattaaactttttatgttgagtatgcttccatccacttcttccttcccccaacctcagtttctgatactttccttccttgctctgagggttacgggtctaattgaattggatactagagtaaaacaagtggagaaaatcctgtttttttataaatttgatttcatttctttgggattatggattttagtcatttcttctcttggtttttggagtttcctattgacttcatatttgctattaaaagatattatagttttataaacaagtatgaattatccaaaacaacttgcaatggatatatcttccaaaaccttcagatgtgattttctgtattccctacacataatcctaagaactttgttagtaatccaaagtaaagcaaagtcttacagtttaatgcttgtctgattaatgctagggaacttgaagtactgttagagaaatgtaaagtgatacaatgcttttaaaagctgaatggctgtatagctgcttcacagaaacttatatttgttttataaagcagatttttgttgtgttttctgtctttatttgagggttagaatttgagtaaaatttatattatcctgaagtgtgcatcttagtgtatagtcgattcttgtgaaatcttccattcatggaaatttaatctttctgatattttgctattgcttttagacagatgtattaaatgataagcaagtttgactttttctattagaatgtttctttaaaaccatgctgcttaaatcactttgttgttatcataagttgttttcttgtggactaaaccccttataaaagtgtttgtgaataactttgccttgttattttgctgatttagacatattttcagaatcatggggtcttaatttataacctataaattatatagtaaattcatttagtaaaaccctcatataaacatgaaaagggactggcagaagaacacaaatttttattttcttttgttaatagccttgtaaatgtgtaaagtgattcagtttgttttattccagttgggtctttgtcttctgaggatcatgattttgaccccactgctgagatgttggtccatgactatgatgatgaaagaactcttgaagaagaggaaatgatggatgagggtaaaaacttcagttcagaaattgaagacttagaaaaggtataagatttactttaatatacaaacttaacaaagattttgaaattctgttgtaattttaaaaataatctacctgaaataaaaataggatcataatccttttttttttcactcttattttgggggatagcctaataagtatgctttcatttaatttttcaaaattattttgtatctgttaacttaatttttaagcttatatcaacacagtgaagtaggtacacgtaggcattttacagatgagaaaattgagatacggaaaactataagccctaagattatttctgaatcctagtctagccctctttccattgtaactactattctgctaagggtcaaacttgaatttgtataagtactgtagtagatacagagagaagccttttccttcaaataactcataatctagtggaatattttaagaaaattgaaaaagatttactgtattttcaaatataaattggtaatatcccatcccctgctcctttaaaagtcatctttgaaaaggttggcaagagtgagtgtagtttgtaattttttaagccccaagtcaatataaattcaaatgaactgtattttcatgcatttataccaggactgtatatagagaggtccctataggggtcaccttgaaaacgtgtaggatttatgcttacttaaccatatttgaaaatttcttatcagccagaataacaaaagctttcagaaatgatacttatcccctgagtttcttatacctctttttcttgaaaagggcaagcacattcttatatatatcatctcctctgcttagtagctttgtgaggcaggagtggagtattattttatttccttcttcatgttaatacacagggaaacagaagagtgacttaactgcccacttgctctgatctgttgttcttatctgtagtgaagtacaactgtatacatgtggtctctattctttttattgatgtttaatgaaacatgaaaatgaataaaagaaacagtagagacacaaatataaagagtaaggatcaagcttttagaaggaattttaaattatgttttgattatttctatatcacttgaaatagtgtattctcttaatcttttttagtggaatagggatttaggtattggtgcatgttaacagtcttaggggattgatgttaatgttcattttcaagaattataagtttttatgttcatagtaaataaactcagttgtgtgttgactgtaatgtggcccatattttggtgtttacaaatttttagtacgtcgtgttatggaaaataaggtaagtactaaagcaattttctcgtagtagcactttgagtatagaatatgtggctagattttagttactaaacatactaaaatagggtttatgtaatatctttatatattttaatgtatgcatattactgccatctgagagcttttaatagacctagatttataggtagaactttttttttttgagacgaagacttgctccattgcgcaggctggagtgcagtggcacaatctcggctcactgcagcctctgcctcctgggttcaagtgattctcctgcctcagcctcccgagtagttgggattacaggcatccaccaccacacctggctactttttgtatttttggtagagacggggttttgccatgttggccaggctggtcttgaactcctgacctcaggcagtccacctgcctcggccttccaaagtgctgggattatagcatgagccaccacacctggctggtagaactttttaaagagttcttatttctacttttattaatacataattacccccttgatgttcactgtgagaaaaattcaaaaattcagaaaagcacaaatgagaaagtaaaatatcactttttctaccatttaactttagtataggtttttccttttttgttaaaagaaaaaaaggcatttaggctgggggcagtggctcagacatgtaatctcaacactttgggaggctgaagtgggatgatcgcttgagcccaggagtctgagaccagcctgggccacatagtgagaccctgtttctaccaaaaaaatttaacaattagctgggtgtgatggtgcatgctagtagccccagctacttgggaggctgaggtgggaggatcacttgatcatcccagaagttcaaggttgcagtgagctatgattgtgccactgtattccagagtatgtgacagactgagaccctgtctggaaaaaaaaagatcaccagacatttaaacaaattatatgtatatagttttgcagcctgtgccttaaggtatcagacaggcgttagttactaacattaaaatgcatctcagcctcatttggtccatccagtgataccatcagttgtgtcagatgaatactggcattatttttctaggctcagaggccttgttgattgtaggatgtactgttgatttctttttttttttttgagacggagtctcgctctgtcgcccaggctggagtgcagtggcgcaatcttggcttactgcaggctccgcctcccggattcacgccattctcctgcctcagcttcctgaatagctgggactataggtgcccgccaccaagcctggctaattttttttgtatttttttttttttagtagagacggggtttcaccgtgttagccaggatggtctcgatctcctgacctcgtgatctgccctcctcggcctcccaaagtgctgggattacaggcgtgagccaccgcgcccagcctactgttgacttctaaacagtgcaggtggtggaggaacgcttgtatatgaagtttgcactttagtatcaggctacatcctgattctgatatgtgagggagtgcatcataggatcaaggaaatgatggtatgtgaggaaatggaggtgagagggattaggtgatttgtccaagatattggttagcaattagtggatcttttgccctaaatctggttctcttcctgatataaatcctttgacttacagaacagttcatttataagtgtgactagactctactgtgtcccttaaaatgtaaataggttcaacaaaatacccaagaagaggaagagaaaaatccttatacccgggataaggtgatggatcacacttctaagctgatttagctaccacagatccttacagactttgagacttactaattcaattttgaaaaaattgtttttatgttttaaaggacttaagtgctttattaataggctctcaaagagagttcatttgtgaagtgcttcagagactagattcaccttttccagttttgctttaaaagttttggtgcaaatgatgtgtgttttagcatcagccctctggccacccgtgtcatcccttgaacttattaatgcagtttctacggagatggtcatcttgtccctcaacagatggtcattcctgtgtctttatagaaaagcggggttttcttgagtggatgctgggaacctcctgtctccctcacatgtacaaacttttatattattctttccctcctgtcctgcaaagtatctgtgatatcc

SEQ ID NO: 425 - DNA, 789 bp, Homo sapiens
gctaaatttcttcatactcaactttcagattctttaatctccagctcagcttcaacaattcaacgctgttctttctgaaaaagtacacatcgtgccttctctacttcgctcttggaacataatttctcatggcagtgtttaagaccactctgtggaggttaatttctgggaccttagggataatatgcctttcgttgatggctacgttgggaattttgttgaaaaattactctgactgctgttcttgccaagaaaaatgggttgggtaccggtgcaactgttacttcatttccagtgaacagaaaacttggaacgaaagtcggcatctctgtgcttctcagaaatccagcctgcttcagcttcaaaacacagatgaactggattttatgagctccagtcaacaattttactggattggactctcttacagtgaggagcacaccgcctggttgtgggagaatggctctgcactctcccagtatctatttccatcatttgaaacttttaatacaaagaactgcatagcgtataatccaaatggaaatgctttagatgaatcctgtgaagataaaaatcgttatatctgtaagcaacagctcatttaaatgtttcttggggcagagaaggtggagagtaaagacccaacattactaacaatgatacagttgcatgttatattattactaattgtctacttctggagtctataaaatgtttttaaacagtgtcatatacaattgtcatgtatgtgaaacaatgtgttttaaaattgatgaaattcgttcacct

SEQ ID NO: 426 - DNA, 590 bp, Homo sapiens
ggggctctccgcccctccttctcgcggcgctcgagggaccatggccgatcctcgcgtgagacagatcaagatcaagaccggcgtggtgaagcggttggtcaaagaaaaagtgatgtatgaaaaagaggcaaaacaacaagaagaaaagattgaaaaaatgagagctgaagacggtgaaaattatgacattaaaaagcaggcagagatcctacaagaatccaggatgatgatcccagattgccagcgcaggttggaagccgcatatttggatcttcaacggatactagaaaatgaaaaagacttggaagaagctgaggaatataaagaagcacgtttagtactggattcagtgaagttagaagcctgaaacttttctcgtatggggtggtttttgcattaaatcctggggtccattttacaatccattatttttgaccactgctatgtgttcaagtagtatgagaatgtgattgtttttatctggttacatatatatttctttgtctaatttaatatgtcaaataaatgagttcatctaataaaattgtttattttatactttaaaaaaaaaaaaaaaaaaaaaaaaaaaa

SEQ ID NO: 427 - DNA, 3304 bp, Homo sapiens
ctgagctctgccgcctggctctagccgcctgcctggcccccgccgggactcttgcccaccctcagccatggctccgatatctctgtcgtggctgctccgcttggccaccttctgccatctgactgtcctgctggctggacagcaccacggtgtgacgaaatgcaacatcacgtgcagcaagatgacatcaaagatacctgtagctttgctcatccactatcaacagaaccaggcatcatgcggcaaacgcgcaatcatcttggagacgagacagcacaggctgttctgtgccgacccgaaggagcaatgggtcaaggacgcgatgcagcatctggaccgccaggctgctgccctaactcgaaatggcggcaccttcgagaagcagatcggcgaggtgaagcccaggaccacccctgccgccgggggaatggacgagtctgtggtcctggagcccgaagccacaggcgaaagcagtagcctggagccgactccttcttcccaggaagcacagagggccctggggacctccccagagctgccgacgggcgtgactggttcctcagggaccaggctccccccgacgccaaaggctcaggatggagggcctgtgggcacggagcttttccgagtgcctcccgtctccactgccgccacgtggcagagttctgctccccaccaacctgggcccagcctctgggctgaggcaaagacctctgaggccccgtccacccaggacccctccacccaggcctccactgcgtcctccccagccccagaggagaatgctccgtctgaaggccagcgtgtgtggggtcagggacagagccccaggccagagaactctctggagcgggaggagatgggtcccgtgccagcgcacacggatgccttccaggactgggggcctggcagcatggcccacgtctctgtggtccctgtctcctcagaagggacccccagcagggagccagtggcttcaggcagctggacccctaaggctgaggaacccatccatgccaccatggacccccagaggctgggcgtccttatcactcctgtccctgacgcccaggctgccacccggaggcaggcggtggggctgctggccttccttggcctcctcttctgcctgggggtggccatgttcacctaccagagcctccagggctgccctcgaaagatggcaggagagatggcggagggccttcgctacatcccccggagctgtggtagtaattcatatgtcctggtgcccgtgtgaactcctctggcctgtgtctagttgtttgattcagacagctgcctgggatccctcatcctcatacccacccccacccaagggcctggcctgagctgggatgattggaggggggaggtgggatcctccaggtgcacaagctccaagctcccaggcattccccaggaggccagccttgaccattctccaccttccagggacagagggggtggcctcccaactcaccccagccccaaaactctcctctgctgctggctggttagaggttccctttgacgccatcccagccccaatgaacaattatttattaaatgcccagccccttctgacccatgctgccctgtgagtactacagtcctcccatctcacacatgagcatcaggccaggccctctgcccactccctgcaacctgattgtgtctcttggtcctgctgcagttgccagtcaccccggccacctgcggtgctatctcccccagccccatcctctgtacagagcccacgcccccactggtgacatgtcttttcttgcatgaggctagtgtggtgtttcctggcactgcttccagtgaggctctgcccttggttaggcattgtgggaaggggagataagggtatctggtgactttcctctttggtctacactgtgctgagtctgaaggctgggttctgatcctagttccaccatcaagccaccaacatactcccatctgtgaaaggaaagagggaggtaaggaatacctgtccccctgacaacactcattgacctgaggcccttctctccagcccctggatgcagcctcacagtccttaccagcagagcaccttagacagtccctgccaatggactaacttgtctttggaccctgaggcccagagggcctgcaagggagtgagttgatagcacagaccctgccctgtgggcccccaaatggaaatgggcagagcagagaccatccctgaaggccccgcccaggcttagtcactgagacagcccgggctctgcctcccatcacccgctaagagggagggagggctccagacacatgtccaagaagcccaggaaaggctccaggagcagccacattcctgatgcttcttcagagactcctgcaggcagccaggccacaagacccttgtggtcccaccccacacacgccagattctttcctgaggctgggctcccttcccacctctctcactccttgaaaacactgttctctgccctccaagaccttctccttcacctttgtccccaccgcagacaggaccagggatttccatgatgttttccatgagtcccctgtttgtttctgaaagggacgctacccgggaagggggctgggacatgggaaaggggaagttgtaggcataaagtcaggggttcccttttttggctgctgaaggctcgagcatgcctggatggggctgcaccggctggcctggcccctcagggtccctggtggcagctcacctctcccttggattgtccccgacccttgccgtctacctgaggggcctcttatgggctgggttctacccaggtgctaggaacactccttcacagatgggtgcttggaggaaggaaacccagctctggtccatagagagcaagacgctgtgctgccctgcccacctggcctctgcactcccctgctgggtgtggcgcagcatattcaggaagctcagggcctggctcaggtggggtcactctggcagctcagagagggtgggagtgggtccaatgcactttgttctggctcttccaggctgggagagcctttcaggggtgggacaccctgtgatggggccctgcctcctttgtgaggaagccgctggggccagttggtcccccttccatggactttgttagtttctccaagcaggacatggacaaggatgatctaggaagactttggaaagagtaggaagactttggaaagacttttccaaccctcatcaccaacgtctgtgccattttgtattttactaataaaatttaaaagtcttgtgaaaaaaaaaaaaaaaaaaaaaaaaaaaaaaaaa

SEQ ID NO: 428 - DNA, 1985 bp, Homo sapiens
cacgttacagcgtccagctcatgagttttgtttataacttgtcagacacacaccttttccccaatgcgagctccaaagaaatcaagactgtggaatctataactgacatcagggcagatatagataaaaaatacagatgtgttagtggcacccaggtccacatgaacaacgtgaccgtaacgctccatgatgccaccatccaggcgtacctttccaacagcagcttcagcaggggagagacacgctgtgaacaagacaggccttccccaaccacagcgccccctgcgccacccagcccctcgccctcacccgtgcccaagagcccctctgtggacaagtacaacgtgagcggcaccaacgggacctgcctgctggccagcatggggctgcagctgaacctcacctatgagaggaaggacaacacgacggtgacaaggcttctcaacatcaaccccaacaagacctcggccagcgggagctgcggcgcccacctggtgactctggagctgcacagcgagggcaccaccgtcctgctcttccagttcgggatgaatgcaagttctagccggtttttcctacaaggaatccagttgaatacaattcttcctgacgccagagaccctgcctttaaagctgccaacggctccctgcgagcgctgcaggccacagtcggcaattcctacaagtgcaacgcggaggagcacgtccgtgtcacgaaggcgttttcagtcaatatattcaaagtgtgggtccaggctttcaaggtggaaggtggccagtttggctctgtggaggagtgtctgctggacgagaacagcatgctgatccccatcgctgtgggtggtgccctggcggggctggtcctcatcgtcctcatcgcctacctcgtcggcaggaagaggagtcacgcaggctaccagactatctagcctggtgcacgcaggcacagcagctgcaggggcctctgttcctttctctgggcttagggtcctgtcgaaggggaggcacactttctggcaaacgtttctcaaatctgcttcatccaatgtgaagttcatcttgcagcatttactatgcacaacagagtaactatcgaaatgacggtgttaattttgctaactgggttaaatattttgctaactggttaaacattaatatttaccaaagtaggattttgagggtgggggtgctctctctgagggggtgggggtgccgctgtctctgaggggtgggggtgccgctgtctctgaggggtgggggtgccgctctctctgagggggtgggggtgccgctctctctgagggggtgggggtgccgctctctctgagggggtgggggtgctgctctctccgaggggtggaatgccgctgtctctgaggggtgggggtgccgctctaaattggctccatatcatttgagtttagggttctggtgtttggtttcttcattctttactgcactcagatttaagccttacaaagggaaagcctctggccgtcacacgtaggacgcatgaaggtcactcgtggtgaggctgacatgctcacacattacaacagtagagagggaaaatcctaagacagaggaactccagagatgagtgtctggagcgcttcagttcagctttaaaggccaggacgggccacacgtggctggcggcctcgttccagtggcggcacgtccttgggcgtctctaatgtctgcagctcaagggctggcacttttttaaatataaaaatgggtgttatttttatttttttttgtaaagtgatttttggtcttctgttgacattcggggtgatcctgttctgcgctgtgtacaatgtgagatcggtgcgttctcctgatgttttgccgtggcttggggattgtacacgggaccagctcacgtaatgcattgcctgtaacaatgtaataaaaagcctctttctttttaaaaaaaaaaaaaaaaaaaaaaaaaaaaaaaaaaaaaaaaaaaaaaaaaa

SEQ ID NO: 429 - DNA, 1911 bp, Homo sapiens
agcacatggcaagggggaccccagagaaagcggcccagaaggggcaggaggagggcttcccagagccatagcagcctagagcaggggccagagctgcactttgcagatggagagcccttgcccgggaccgccctgtggggtgggagtctaggcctctgcccccactcacggctccactccatccccacagttattggctgaccttgctgggaggatggagtctcctgggtgagacagaggccctttgagggtgggtgctggccttgccttccttgaggcctctccctgcaggacgccccctctagcctctccatcagttccccccaggcccaggcccacaccaggcagaagagtcccgacactggtggcagaggcaggggtgagggatgggggcacctacctctttgccaccccatccaggccaggatggagcctccactcccagcccaggaccaagaaggcagggctgataaccccatgacacagaatcggatgtcagaggctcaaggaaagactgcttggcccatagccacacaggagtcaggaatgtggagggaatgaggcttggagcaatccaagagcagagctgcagggcactcggagctgctctggcccattctctacctgctaaaggcctcagagaggggcagggttgacccaaggtcatgcagcaggtggggcaggctctgtactcccgagcctcagtttcctcacgttaccccatccatcctccctgaaaacgccatctccatcagccttgaggggcagaggcatgacccaaaaggcctggctgggccctctaggtggacagtcctagcaaccatggctcaatgccaggcctggctgtgatgagcccgtttgctgcaagaggagactgaggttcagagaagtcgagggtccatggctgagcagagctggcaccaaagcccacacgggccagcacaacagggtaggggatggggcaggggcagagtggcagtgctgatggcgtcggccctctctaggttgcacaagcaaaggcctcgtcctgcccgccgtgctgggcatcacctttggtgccttcctcatcggggccctgctcactgctgcactctggtacatctactcgcacacgcgttcccccagcaagcgggagcccgtggtggcggtggctgccccggcctcctcggagagcagcagcaccaaccacagcatcgggagcacccagagcaccccctgctccaccagcagcatggcatagccccggccccccgcgctcgcccagcaggagagactgagcagccgccagctgggagcactggtgtgaactcaccctgggagccagtcctccactcgacccagaatggagcctgctctccgcgcctacccttcccgcctccctctcagaggcctgctgccagtgcagccactggcttggaacaccttggggtccctccaccccacagaaccttcaacccagtgggtctgggatatggctgcccaggagacagaccacttgccacgctgttgtaaaaacccaagtccctgtcatttgaacctggatccagcactggtgaactgagctgggcaggaagggagaacttgaaacagattcaggccagcccagccaggccaacagcacctccccgctgggaagagaagagggcccagcccagagccacctggatctatccctgcggcctccacacctgaacttgcctaactaactggcaggggagacaggagcctagcggagcccagcctgggagcccagagggtggcaagaacagtgggcgttgggagcatagctcctgccacatggagccccctctgccggtcgggcagccagcagagggggagtagccaagctgcttgtcctgggcctgcccctgtgtattcaccaccaataaatcagaccaaaaaaaaaaaaaa

SEQ ID NO: 430 - DNA, 915 bp, Homo sapiens
gccccgggagggggctgcagtttccttccttccttctcggcagcgctccgcgcccccatcgcccctcctgcgctagcggaggtgatcgccgcggcgatgccggaggagggttcgggctgctcggtgcggcgcaggccctatgggtgcgtcctgcgggctgctttggtcccattggtcgcgggcttggtgatctgcctcgtggtgtgcatccagcgcttcgcacaggctcagcagcagctgccgctcgagtcacttgggtgggacgtagctgagctgcagctgaatcacacaggacctcagcaggaccccaggctatactggcaggggggcccagcactgggccgctccttcctgcatggaccagagctggacaaggggcagctacgtatccatcgtgatggcatctacatggtacacatccaggtgacgctggccatctgttcctccacgacggcctccaggcaccaccccaccaccctggccgtgggaatctgctctcccgcctcccgtagcatcagcctgctgcgtctcagcttccaccaaggttgtaccattgcctcccagcgcctgacgcccctggcccgaggggacacactctgcaccaacctcactgggacacttttgccttcccgaaacactgatgagaccttctttggagtgcagtgggtgcgcccctgaccactgctgctgattagggttttttaaattttattttattttatttaagttcaagagaaaaagtgtacacacaggggccacccggggttggggtgggagtgtggtggggggtagtggtggcaggacaagagaaggcattgagctttttctttcattttcctattaaaaaatacaaaaatcaaaaaaaaaaaaaaaaaaaaaaaaaaaaaaaaaaaaaaaaaaaaaaaaaaaaaaaaa

SEQ ID NO: 431 - DNA, 5054 bp, Homo sapiens
ttggactagaagctgaaataacagaagctgtgtacgatgcattagggtattgaagaaaattaacttttgaattaaatatttggaatataaggaaataaggaaagttgactgaaaatggggcggaagaaaatacaaatcacacgcataatggatgaaaggaaccgacagactttaagaaagaaaggccttaatggttgtgagagccctgatgctgacgattactttgagcacagtccactctcggaggacagattcagcaaactaaatgaagatagtgattttattttcaaacgaggccctcctggtctgccacctcagaacttttcaatgtctgtcacagttccagtgaccagccccaatgctttgtcctacactaacccagggagttcactggtgtccccatctttggcagccagctcaacgttaacagattcaagcatgctctctccacctcaaaccacattacatagaaatgtgtctcctggagctcctcagagaccaccaagtactggcaatgcaggtgggatgttgagcactacagacctcacagtgccaaatggagctggaagcagtccagtggggaatggatttgtaaactcaagagcttctccaaatttgattggagctactggtgcaaatagcttaggcaaagtcatgcctacaaagtctccccctccaccaggtggtggtaatcttggaatgaacagtaggaaaccagatcttcgagttgtcatccccccttcaagcaagggcatgatgcctccactaaacacccaaaggatcagtagttctcaagccactcaacctcttgctaccccagtcgtgtctgtgacaaccccaagcttgcctccgcaaggacttgtgtactcagcaatgccgactgcctacaacactgattattcactgaccagcgctgacctgtcagcccttcaaggcttcaactcgccaggaatgctgtcgctgggacaggtgtcggcctggcagcagcaccacctaggacaagcagccctcagctctcttgttgctggagggcagttatctcagggttccaatttatccattaataccaaccaaaacatcagcatcaagtccgaaccgatttcacctcctcgggatcgtatgaccccatcgggcttccagcagcagcagcagcagcagcagcagcagcagccgccgccaccaccgcagccccagccacaacccccgcagccccagccccgacaggaaatggggcgctcccctgtggacagtctgagcagctctagtagctcctatgatggcagtgatcgggaggatccacggggcgacttccattctccaattgtgcttggccgacccccaaacactgaggacagagaaagcccttctgtaaagcgaatgaggatggacgcgtgggtgacctaaggcttccaagctgatgtttgtacttttgtgttactgcagtgacctgccctacatatctaaatcggtaaataaggacatgagttaaatatatttatatgtacatacatatatatatccctttacatatatatgtatgtgggtgtgagtgtgtgtgtatgtgtgggtgtgtgttacatacacagaatcaggcacttacctgcaaactccttgtaggtctgcagatgtgtgtcccatggcagacaaagcaccctgtaggcacagacaagtctggcacttccttggactacttgtttcgtaaagataaccagtttttgcagagaaacgtgtacccatatataattctcccacactagcttgcagaaacctagagggccccctacttgttttatttaactgtgcagtgactgtagttacttaagagaaaatgctttgtagaacagagcagtagaaaagcaggaaccaagaaagcaatactgtacataaaatgtcatttatattttccaacctggcatgggtgtctgttgcaaagaggtgcatgggaaagggctgttgatattaaaaacaaacaaaacaaaaaaccccacacataactgttttgcacgtgcaaaaatgtattgggtcaagaagtgatctttagctaataaagaaagagaatagaaaacacgcatgagatattcagaaaatactagcctagaaatatagagcattaacaaagtaaaattaatatattaagttataattggaatatgtcagaagtttctttttacattcatatcttaaaaattaaagaaactgattttagctcatgtatattttatatgaaagaaaacacccttatgaattgatgactatatataaaattatattcactacttttgaacacattctgctatgaattatttatataagccaaagctatatgttgtaacttttttttagagaatagctttatcttggtttaactctttagttttattttaagaggggaaaacaaaaatatcttgcaagcagaaccttggaaaaaaaaaagccatgaacacttattctaaatgtaaattaaaagttgagccaaactctttgtgtatatagcatcttaaatatattatcacctttgatgtaagtacctatgtattgtatggtcaccagattaaaaagtatatttttgtggattgccgccaatctggggggaaaaggcgaggtcctttattaagtattcactgtttaatatttactattttgttaaatatactgtactttggattttaattattagcccagttttttcagaggattgtataaaggggtttctcccctcactggtggtgaatgtgtgatgttacattgtaatctttgtgctgtatgggttgagcatcattatatattttgtatgtgtacataaatagcaaagtggcaaaaaaaattggtgttaagttcatcctgcataagtataaaatgtgttgtaacagattttataaggcattatttaaaacttgccttttgtgaggaaaaaatgtagtagaaaaagctgacctaatttaattaatattagagaaaatggcaaaatagtagatgagcacaaaggttttataagtggtaaatgattaggggaaaataatcatggggaaagggatcttttttccttgaccctctgaaaacagaacgatgcagctggttacaaaatcctaccgttatcagctcttctgcacattgcagtgatgctttggtatgcggggagaaacactcttagggtgccggtccttggcatgactcttgccattctaattggaattagtgccaccctcagcttggattttgaacaaggccttattctttcaggaagacaactaatggatgatagcaagttcatccacttactgggcttgtgccatgagcaaaattcaaagtcctgtatatctttcattgtagatttttaaatactccttttcctaaaaaactcaagggtttaaaaattgctattttatattttaaatgatattgagcagctacctacaatttctatgtacattttgttccccccccaccacccccccccaaattaccttccttttgacattttcctcatctgctgtttgtgacaagtcatcagccagatttcctgactgacacataggtatgatcagtgcaggagagacctgcgcaccacaggctgcaaactggaggttctgttctcatggcagtttgggcagtaacttttgagagaggccaaaaaaaggaggatgacatgctgtctcctctcttcagtatagacattaggctcttattcagaaaggatttttctttaaaaatgtacttactttactgaactacttacaggcacatttcttcataaggccacacctaatccaaacaagacagtctcccaacactgaagttccaaaataatccttaccactttgtaaaccatttatagctttgaaagtgttaagtgattccttcgttattatttatgcatgttcatgaacttctgctgtacattggaataggagttaacacattcacatttactgtctattttcttgtgtgccttatgagatggcttttctgactgtatctcaatagtctttctttctatgcaggtttataatcagtacaactactgttttctaaaatactactactcaaggctcggagtttgtatttaaattacactgaccaagtaacaatgtattccatttcaggaactgaatatttgactgttaacctttttcccatacgtccagtgtggcatggagcatatggacttgacagacatctctcacccagacgcccacgtgtgaacacacccacatccacatctctgggtggaaaccagcctagagtggggacgacgctaatggtgttgctttagaaccgtcttttcttacccttttagactcgtgttttgtatgagacaccattgcaagaaaattttatccctccagaagtattttattactaaagaacaaaagcaaaaaaagcttaaattgcactggttaaagtacagtttccaacagctgtccttcctcagtactctaatggccactccaccgcgagtggaagtcactgttgtgtgtacacaggtggtcccaatcaaaactccatcttttgagcccaattatgtccattttgttatagactaaatcaggggtttgttctacaagaacaatacatgttttaccctttcctttaactagaaggataactagtaatgcatcaacataatttctgtattaaccatcatgcgcacaagaaatacatagtaaataaggaagctgaaaactcctggcattggatcttaagctagatgattagaatgtgaaaaagattttacaaatgtaaaacttctatttctctgtagaaactttcttcactttgctgtgcaagaagacactgctttgctatatttaaaatggcttttttaaaagagatttatgtatttggtaaatgtttgtagtcaacagttcacacaagaagctgtacacggtttgatcatgtaaaaccgtttggcggcacaagctggactttgttgccatccttgagatgaaccttttaagaaaaataagttaatctcaatttttccctgaatgtgttgtttttcttcattatacaataaatataatagtgaactttttatcaaaaaaaaaaaaaaa

SEQ ID NO: 432 - DNA, 1961 bp, Homo sapiens
gggcggcggcggcagcggttggaggttgtaggaccggcgaggaataggaatcatggcggctgcgctgttcgtgctgctgggattcgcgctgctgggcacccacggagcctccggggctgccggcttcgtccaggcgccgctgtcccagcagaggtgggtggggggcagtgtggagctgcactgcgaggccgtgggcagcccggtgcccgagatccagtggtggtttgaagggcagggtcccaacgacacctgctcccagctctgggacggcgcccggctggaccgcgtccacatccacgccacctaccaccagcacgcggccagcaccatctccatcgacacgctcgtggaggaggacacgggcacttacgagtgccgggccagcaacgacccggatcgcaaccacctgacccgggcgcccagggtcaagtgggtccgcgcccaggcagtcgtgctagtcctggaacccggcacagtcttcactaccgtagaagaccttggctccaagatactcctcacctgctccttgaatgacagcgccacagaggtcacagggcaccgctggctgaaggggggcgtggtgctgaaggaggacgcgctgcccggccagaaaacggagttcaaggtggactccgacgaccagtggggagagtactcctgcgtcttcctccccgagcccatgggcacggccaacatccagctccacgggcctcccagagtgaaggctgtgaagtcgtcagaacacatcaacgagggggagacggccatgctggtctgcaagtcagagtccgtgccacctgtcactgactgggcctggtacaagatcactgactctgaggacaaggccctcatgaacggctccgagagcaggttcttcgtgagttcctcgcagggccggtcagagctacacattgagaacctgaacatggaggccgaccccggccagtaccggtgcaacggcaccagctccaagggctccgaccaggccatcatcacgctccgcgtgcgcagccacctggccgccctctggcccttcctgggcatcgtggctgaggtgctggtgctggtcaccatcatcttcatctacgagaagcgccggaagcccgaggacgtcctggatgatgacgacgccggctctgcacccctgaagagcagcgggcagcaccagaatgacaaaggcaagaacgtccgccagaggaactcttcctgaggcaggtggcccgaggacgctccctgctccacgtctgcgccgccgccggagtccactcccagtgcttgcaagattccaagttctcacctcttaaagaaaacccaccccgtagattcccatcatacacttccttcttttttaaaaaagttgggttttctccattcaggattctgttccttaggtttttttccttctgaagtgtttcacgagagcccgggagctgctgccctgcggccccgtctgtggctttcagcctctgggtctgagtcatggccgggtgggcggcacagccttctccactggccggagtcagtgccaggtccttgccctttgtggaaagtcacaggtcacacgaggggccccgtgtcctgcctgtctgaagccaatgctgtctggttgcgccatttttgtgcttttatgtttaattttatgagggccacgggtctgtgttcgactcagcctcagggacgactctgacctcttggccacagaggactcacttgcccacaccgagggcgaccccgtcacagcctcaagtcactcccaagccccctccttgtctgtgcatccgggggcagctctggagggggtttgctggggaactggcgccatcgccgggactccagaaccgcagaagcctccccagctcacccctggaggacggccggctctctatagcaccagggctcacgtgggaacccccctcccacccaccgccacaataaagatcgcccccacctccacccaaaaa

1.-15. (canceled)

16. Use of gene expression profiles obtained in vitro from a patient's sample for establishing a local inflammation of a fever of unknown origin (FUO), wherein polynucleotides used for establishing said gene expression profiles show similar gene activity data in their expression behaviour and are grouped in diagnostic gene activity clusters and wherein the diagnostic gene activity clusters are composed as follows:
Cluster 1: SEQ-ID No.1 to SEQ-ID No. 77
Cluster 2: SEQ-ID No. 78 to SEQ-ID No. 191
Cluster 3: SEQ-ID No. 192 to SEQ-ID No. 432.

17. The use according to claim 1, wherein the polynucleotides of SEQ-IDs 1 to 77 are specific for peritonitis as the local inflammation of a FUO, the polynucleotides of SEQ-IDs 78 to SEQ-ID No. 191 are specific for pneumonia as the local inflammation of a FUO, and the polynucleotides of SEQ-IDs 192 to 432 are specific for the local inflammation of a FUO but not for peritonitis or pneumonia as the local inflammation of a FUO.

18. The use according to claim 1, wherein the gene expression profiles of at least 2 polynucleotides are recorded.

19. The use according to claim 1, wherein the gene expression profiles are utilized as inclusion or exclusion criterion to decide whether patients with the FUO are included into clinical studies or excluded therefrom and to establish gene activity data for electronic further processing.

20. The use according to claim 1, wherein the gene activity data obtained are used for the production of software for the description of the individual prognosis of a patient, for diagnostic purposes and/or patent data management systems, and/or the gene expression profiles obtained in vitro from a patient's sample are used for the creation of clinical expert systems and/or for modelling cellular signal transduction pathways.

21. The use according to claim 1, wherein a specific gene or gene fragment is used for generation of the gene expression profile, the gene or gene fragment being selected from the group consisting of SEQ-ID No. 1 to SEQ-ID No. 432, gene fragments thereof with at least 20-2000 nucleotides and genes with a homology of sequence of at least 80%.

22. The use according to claim 1, wherein the gene expression profiles are ascertained by means of hybridizing methods, in particular hybridizing methods based on microarrays or real-time PCR.

23. A method for in vitro measurement of gene expression profiles and at least one gene activity cluster for establishing a local inflammation of a FUO, characterized in that, in a patient, the gene activity of a plurality of certain genes related to the local inflammation of a FUO is determined in a patient's sample, the genes being selected from a group consisting of: SEQ-ID No.1 to SEQ-ID No. 191 and are grouped in diagnostic clusters as follows:
Cluster 1: SEQ-ID No.1 to SEQ-ID No. 77
Cluster 2: SEQ-ID No. 78 to SEQ-ID No. 191.

24. The method of claim 8, characterized in that for in vitro measurement of the gene expression profiles and at least one gene activity cluster for establishing peritonitis or pneumonia of the local inflammation of a FUO, in patients, the gene activity of a plurality of certain genes or gene fragments related to peritonitis or pneumonia as the local inflammation of a FUO are determined in a patient's sample, wherein the genes or gene fragments specific for peritonitis or pneumonia are selected from the group consisting of: SEQ-ID No. 1 to SEQ-ID No. 191, gene fragments thereof with at least 20-2000 nucleotides as well as genes with a homology of sequence of at least 80%.

25. The method of claim 9, wherein the genes or gene fragments or sequences derived from their RNA are replaced with a member selected from the group consisting of synthetic analogues, aptamers, Spiegelmers, peptido- and morpholinonucleic acids.

26. The method of claim 8, wherein the gene activities are determined by a member selected from the group consisting of hybridisation methods, microarrays, hybridisation-independent methods, and amplification methods.

27. Use of gene expression profiles that are obtained in vitro from a patient sample or of probes used therefore, selected from the group consisting of SEQ-ID No. 1 to SEQ-ID No. 432 as well as gene fragments thereof with at least 20 nucleotides, for determining gene activity of protein products derived therefrom for screening active agents against a member selected from the group consisting of a FUO, peritonitis and pneumonia, further wherein the gene expression profiles are used for evaluation of therapeutic effects of the active agents against the FUO, peritonitis or pneumonia.

28. The use of claim 12, wherein the genes or gene fragments or sequences derived from their RNA are replaced with a member selected from the group consisting of synthetic analogues, aptamers, Spiegelmers, peptido- and morpholinonucleic acids.

29. A kit containing a selection of sequences according to SEQ-ID No. 1 to SEQ-ID No. 432, which are specific for establishment of a local inflammation of a FUO, and gene fragments thereof with at least 20 nucleotides for determination of gene expression profiles in vitro in a patient's sample, for use in determination of a source of infection or a source of infection of a FUO.

30. The kit of claim 14, further containing a selection of at least 2 polynucleotides with sequences according to SEQ-ID No. 1 to SEQ-ID No. 196 or gene fragments thereof with at least 20 nucleotides for the determination of gene expression profiles in vitro in the patient's sample, further wherein the kit is used for the establishment of peritonitis or pneumonia as the local inflammation of a FUO.
